(19) United States
(12) Patent Application Publication
(10) Pub. No.: US 2015/0353932 A1
(43) Pub. Date: Dec. 10, 2015

(54) FUNCTIONAL LIGANDS TO TARGET MOLECULES

(71) Applicant: Base Pair Biotechnologies, Inc., Houston, TX (US)

(72) Inventor: George W. Jackson, Pearland, TX (US)

(21) Appl. No.: 14/297,484

(22) Filed: Jun. 5, 2014

(51) Int. Cl. C12N 15/115; C12N 15/117

(52) U.S. Cl. CPC C12N 15/115; C12N 15/117; C12N 2310/16; C12N 2310/17

(57) ABSTRACT

The present invention relates functional ligands to target molecules, particularly to functional nucleic acids and modifications thereof, and to methods for simultaneously generating, for example, numerous different functional biomolecules, particularly to methods for generating numerous different functional nucleic acids against multiple target molecules simultaneously. The present invention further relates to functional ligands which bind with affinity to target molecules.

### CROSS-REFERENCE TO RELATED APPLICATIONS

[0001] This application is a continuation-in-part of U.S. utility patent application Ser. No. 13/748,566, filed Jan. 23, 2013, entitled “FUNCTIONAL LIGANDS TO TARGET MOLECULES”, which is still pending, which is a continuation-in-part of U.S. utility patent application Ser. No. 13/493,996, filed Jun. 11, 2012, entitled “FUNCTIONAL LIGANDS TO TARGET MOLECULES”, which is still abandoned, which is a non-provisional of U.S. provisional patent application Ser. No. 61/495,976, entitled “FUNCTIONAL LIGANDS TO TARGET MOLECULES”, filed Jun. 11, 2011, and is a continuation-in-part of U.S. utility patent application Ser. No. 12/683,429, filed Jan. 7, 2010, entitled “METHODS FOR SIMULTANEOUS GENERATION OF FUNCTIONAL LIGANDS”, which issued as U.S. Pat. No. 8,314,052 on Nov. 20, 2012, which claims the benefit of U.S. provisional patent application Ser. No. 61/162,394, filed Mar. 23, 2009, entitled “METHODS FOR SIMULTANEOUS GENERATION OF FUNCTIONAL LIGANDS”, and U.S. Pat. No. 8,034,569, filed Jun. 6, 2009, entitled “METHODS FOR MOLECULAR DETECTION”, which claims the benefit of U.S. provisional patent application Ser. No. 61/059,435, filed Jun. 6, 2008, entitled “METHODS FOR MOLECULAR DETECTION”, the contents of all of which are hereby incorporated by reference in their entireties.

[0002] This application is a non-provisional of and claims the benefit and priority of U.S. provisional patent application Ser. No. 61/917,655, filed Dec. 18, 2013, entitled “FUNCTIONAL LIGANDS TO TARGET MOLECULES”, and Ser. No. 61/831,334, filed Jun. 5, 2013, entitled “FUNCTIONAL LIGANDS TO TARGET MOLECULES”, the contents of all of which are hereby incorporated by reference in their entireties.

### FIELD OF THE INVENTION

[0003] This invention relates to functional ligands to target molecules, particularly to functional nucleic acids and modifications thereof and methods for generating functional ligands, particularly to methods for generating multiple functional nucleic acids against multiple different target molecules simultaneously.

### SEQUENCE LISTING

[0004] 3325 Deoxyribonucleic acid sequences are hereby incorporated by reference to the ASCII text file entitled “P1011US08.txt”, created Jun. 5, 2014, of 676 KB in size. The sequences are for DNA aptamers to Botulinum Neurotoxin Type B (BontB) from Clostridium botulinum (Metabiologics, Inc.), MMP9 (MMP9V) from Homo sapiens (Sino Biological, Inc., catalog #10327-HNAH), Alpha Fetoprotein (AFP) from Homo sapiens (Fitzgerald Industries International, catalog #30-1029), IgE (IGE) from Homo sapiens (Abcam, plc, catalog #ab65866), IgG Fc Fragment (IgGh) from Homo sapiens (Jackson ImmunoResearch Laboratories, Inc., catalog #009-000-008), IgG Fc Fragment (IgGm) from Mus musculus (Jackson ImmunoResearch Laboratories, Inc., catalog #015-000-008), CMV Virus Glycoprotein B (CMVgB) from Homo sapiens (Sino Biological, Inc.), or Interferon Gamma (IFNg) from Bos taurus (GenWay Biotech Inc.), as indicated in the sequence listing, and are intended to include other aptamers incorporating modifications, truncations, incorporations into larger molecules or complexes, and/or other aptamers having substantial structural or sequence homology, for example, greater than 75% sequence homology, as well as RNA and/or other non-DNA aptamers. The disclosed aptamers may also bind to homologous proteins from organisms other than the organisms listed herein, to recombinant or non-recombinant versions of the proteins, to modified versions of the proteins, to proteins from sources other than the source listed herein. The indication of the species and source of the target proteins is given for reference only and is not intended to be limiting.

### BACKGROUND OF THE INVENTION

[0005] Aptamers, which are nucleic acid ligands capable of binding to molecular targets, have recently attracted increased attention for their potential application in many areas of biology and biotechnology. They may be used as sensors, therapeutic tools, to regulate cellular processes, as well as to guide drugs to their specific cellular target(s). Contrary to the actual genetic material, their specificity and characteristics are not directly determined by their primary sequence, but instead by their secondary and/or tertiary structure. Aptamers have been recently investigated as immobilized capture elements in a microarray format. Others have recently selected aptamers against whole cells and complex biological mixtures.

[0006] Aptamers are commonly identified by an in vitro method of selection sometimes referred to as Systematic Evolution of Ligands by EXponential enrichment or “SELEX”. SELEX typically begins with a very large pool of randomized polynucleotides which is generally narrowed to one aptamer ligand per molecular target. Once multiple rounds (typically 10-15) of SELEX are completed, the nucleic acid sequences are identified by conventional cloning and sequencing. Aptamers have most famously been developed as ligands to important proteins, rivaling antibodies in both affinity and specificity, and the first aptamer-based therapeutics are now emerging. More recently, however, aptamers have been also developed to bind small organic molecules and cellular toxins, viruses, and even targets as small as heavy metal ions.

### SUMMARY OF THE INVENTION

[0007] The present invention relates functional ligands to target molecules, particularly to functional nucleic acids and modifications thereof, and to methods for simultaneously generating, for example, numerous different functional biomolecules, particularly to methods for generating numerous different functional nucleic acids against multiple target molecules simultaneously. The present invention further relates to functional ligands which bind with affinity to target molecules. The present invention further relates to methods for generating, for example, functional biomolecules, particularly to functional nucleic acids, that bind with functional activity to another biomolecule, such as a receptor molecule. More than one or multiple targets as used herein may generally include different types of targets, and/or may also include a multitude of a singular type of targets at different conditions, such as, for example, temperature, pH, chemical environment, and/or any other appropriate conditions.

[0008] In general, a method for generating functional biomolecules includes obtaining a library, such as a diverse or randomized library, for example, of biomolecules. Biomolecules may generally include nucleic acids, particularly single-stranded nucleic acids, peptides, other biopolymers and/or combinations or modifications thereof. A library of biomolecules may include nucleic acid sequences, such as ribonucleic acid (RNA), deoxyribonucleic acid (DNA), artificially modified nucleic acids, and/or combinations thereof. The method for generating functional biomolecules further includes contacting the library of biomolecules with more than one target, such as, for example, a molecular target, material and/or substance. In general, the members of the library that do not bind with some affinity to the more than one target may be washed or otherwise partitioned from the remainder of the library, which may have a given level of binding affinity to the more than one target. The process may be repeated to partition the strongest binding members of the library. Amplification of the biomolecules may also be utilized to increase the numbers of the binding members of the library for subsequent repetitions and for isolation and/or purification of any final products of the process. Embodiments of the SELEX method may generally be utilized to achieve the generation of functional biomolecules of a given binding affinity, such biomolecules generally referred to as aptamers or ligands.

[0009] In one exemplary aspect of the invention, generation of functional biomolecules may be performed against more than one or multiple targets simultaneously within a single system, such as the generation of functional nucleic acid ligands within a single reaction volume. In general, more than one or a plurality of targets may be disposed within in a single reaction volume, and a library of biomolecules, such as a nucleic acid library, may be applied to the reaction volume. The members of the library that do not bind to any of the plurality of targets under given conditions may then be partitioned, such as by washing. One or more rounds of binding and partitioning of the members of the library may be performed, such as, for example, to obtain a remainder of members of the library with a given affinity for their targets. The remaining members that bind to the plurality of targets of the library may then be marked and/or tagged, such as to identify the particular target or targets to which the member(s) of the library binds. The binding members of the library may then be isolated and, by virtue of the marking or tagging, be matched to a particular target or targets. This is desirable as high capacity, multiplexed identification procedures may save time, expense, and physical space for the process over single target identification processes. The present method may also be desirable as it may be utilized to identify and/or eliminate biomolecules that bind or have a tendency to bind to multiple targets.

[0010] In an exemplary embodiment, a plurality of target molecules are affixed to a substrate within a single reaction volume, such as, for example, by attaching the targets to a substrate of an array. It may generally be appreciated that a single reaction volume may refer to or include multiple reaction sub-volumes, such as, for example, discrete or semi-discrete fluid droplets. In general, the targets may be disposed with multiple copies of each target in clusters or “spots” such that a given array may have an ordered deposition of targets on the substrate, with each target identifiable by the location of a particular spot on the substrate. A library of nucleic acids may then be contacted or applied to the array and the non-binding members of the library may be partitioned or washed off the array. The binding and washing steps may be repeated and may also utilize an amplification step to generate additional copies of any remaining binding members of the library. The array may then be marked or tagged with a plurality of identifiers, such as, for example, a plurality of oligonucleotides which may universally bind through Watson-Crick interactions to the members of the library of nucleic acids. The marking or tagging may be, for example, accomplished by manually applying identifiers, such as by pipetting or the like, utilizing microcontact pins, applying membranes/films with identifiers, printing, for example, inkjet printing, and/or other similar tagging methods, of identifier containing solutions to the array. The identifiers may further include a unique or semi-unique sequence which may be utilized to correspond to the spots and thus the targets of the array. For example, a unique or semi-unique identifier sequence may be utilized that identifies each spatial location on an array, such as each particular target spot. The identifier may then be associated with and/or attached to the nucleic acid members bound to a particular spot. Thus, the nucleic acids, for example, bound to a particular target spot may be identified by the sequence of the associated identifier. In some embodiments, the identifiers may further be primers and may be utilized with a nucleic acid amplification reaction on the array to generate additional copies of the bound nucleic acids. The unique or semi-unique identifier sequence may also be incorporated into the members of the library amplified. This may be desirable for associating a given member with a target or targets while preserving the particular sequence of the member as the locational identifying sequence is appended to the sequence of the library member. This may be particularly desirable for resolving multiple binders to a single target or members of the library that bind to multiple targets.

[0011] In general, the starting library of biomolecules, such as nucleic acids, may be the product of at least one round of a previous SELEX protocol. For example, at least one round of SELEX may be performed with a library of biomolecules against multiple targets, such as, for example, in a solution. The targets in the solution may be substantially identical to the targets disposed on an array. This may be desirable as multiple rounds of selection may be performed with a library prior to applying the remaining members to an array for marking/tagging. Complex target arrays may generally be more expensive and/or difficult to make or utilize than solutions of target molecules, so performing only the final binding and marking/tagging procedure on the array may be desirable.

[0012] In other embodiments, identifiers may be predisposed on the array substrate in substantial proximity to the spots such that they may bind to, for example, nucleic acids bound to the target spots. The identifiers may, for example, be covalently attached to the substrate. In some embodiments, the attachments may be controllably breakable or cleavable such that the identifiers may be released from the substrate such that they may, for example, more easily bind to the bound nucleic acids on the spots.

[0013] In further embodiments, identifiers may be synthesized in situ on the array, such as by light directed in situ nucleic acid synthesis. Appropriately sequenced identifiers may then be synthesized in proximity to particular spots such that the newly synthesized identifiers may bind to the nucleic acids bound to the target spot.

[0014] In still other embodiments, identifiers may be disposed and/or synthesized on a separate substrate, such as a membrane, in a spatial disposition that substantially matches the spatial disposition of spots on the array, i.e. the identifiers may be arranged such that they may be readily superimposed onto the target spots on the array. The identifier substrate may then be contacted with the array with locational matching of the spots with identifiers. The identifiers may then bind to the nucleic acids bound to the target spots. Any appropriate method of facilitating binding may be utilized, such as, for example, actions to drive migration of the identifiers to the array, such as capillary action, electrophoresis, pressure, gravitational settling, and/or any other appropriate method or combination thereof. The separate substrate may also be soluble, erodible, substantially permeable to the identifiers, and/or otherwise adapted for facilitating migration of the identifiers to the array.

[0015] In yet still other embodiments, the array substrate may be physically divided and/or partitioned for separate collection of the, for example, nucleic acids bound to the spots. The spots may, for example, also be controllably removable from the substrate such that they may be individually recovered and sorted.

[0016] In still yet other embodiments, identifiers may be disposed and/or synthesized on a separate substrate, such as a membrane, in a spatial disposition that substantially matches the spatial disposition of spots on the array, i.e. the identifiers may be arranged such that may be readily superimposed onto the target spots on the array. The separate substrate may be kept separately while the array substrate maybe physically divided and/or partitioned for separate collection of the nucleic acids bound to the spots. In this manner, the location of the different nucleic acids maybe maintained even when the array substrate is no longer intact, if the locations are of value. The identifiers may also be selectively applied to particular locations on the array and/or applied in a particular order or in groups.

[0017] In some embodiments, identifiers may only be applied to spots with bound nucleic acids. The spots with bound nucleic acids may be detected, for example, by detecting the presence of nucleic acids, such as by applying nucleic acid binding dyes, such as SYBR dyes, ethidium bromide and/or other appropriate dyes. The members of the nucleic acid library may also include detectable portions, such as, for example, fluorescent moieties, radioactive tags and/or other appropriate detectable portions.

[0018] In some embodiments, the identifiers may be applied to the bound nucleic acids together with other materials, such as for example, components of a nucleic acid amplification reaction, a nucleic acid ligation reaction, photo-linking reagents, and/or any other appropriate material, such as those materials that may facilitate attachment or association of the identifiers to the bound nucleic acids.

[0019] In yet another embodiment, identifiers may be ligated to the, for example, bound nucleic acids. For example, a nucleic acid ligase may be utilized to covalently link an identifier sequence to the bound nucleic acid. Further nucleic acid fragments may be utilized to facilitate ligase action, such as appropriate complementary fragments that may aid the formation of a substantially double-stranded nucleic acid complex compatible with a ligase. For another example, photo-ligation may be used to attach the identifiers to the, for example, bound nucleic acids. Photo-ligation may be especially useful when certain substrates are used. For example, macro-porous substrates.

[0020] In general, methods may be applied that may facilitate binding or other interactions between the identifiers and the, for example, nucleic acids bound to the spots. For example, the temperature may be increased to dissociate the nucleic acids from the spots. The temperature may subsequently be lowered such that, for example, base pairing may occur between the nucleic acids and the identifiers. Further in general, it may be desirable to apply the identifiers in a manner that physically separates and/or isolates the individual target spots such that cross-marking due to identifier diffusion/migration may be minimized. For example, the identifiers may be applied in individual fluid droplets such that there is no continuous fluid contact between individual identifier containing fluids. For further example, the substrate of the array may be absorbent and/or porous such that the identifiers may be absorbed into the substrate material. The substrate material may also block lateral diffusion while allowing vertical diffusion, such that identifiers may be applied and absorbed into the substrate while minimizing diffusion across the plane of the substrate, such as to other target spots.

[0021] In a further embodiment, a method for generating functional biomolecules includes obtaining a library of peptide sequences and contacting the library with a plurality of targets. In some exemplary embodiments, the peptide sequence may be tagged, linked, marked and/or otherwise associated with a nucleic acid sequence. The nucleic acid sequence may be, for example, representative of the sequence of the peptide. For example, the nucleic acid may substantially encode the peptide sequence. Also for example, the nucleic acid may be a unique or semi-unique identifier sequence. The nucleic acid sequence may then be utilized to bind another identifier, as described above, such that a peptide bound to a target may be tagged or marked as to which target it bound.

[0022] In an exemplary embodiment, a bacteriophage (phage) may be generated that includes a peptide sequence of interest in its protein coat. The phage may further include a nucleic acid sequence that may be representative of the peptide sequence within the nucleic acid of the phage. The phage may then be contacted with a plurality of targets, as above. This may generally be referred to as phage display. Non-binding phages may be washed and/or partitioned, while binding phages may be tagged or marked with identifiers, as above. As phage nucleic acids are generally contained within the protein coat of the phage, the nucleic acid may generally be exposed for binding to the identifier. For example, the phage may be heated such that the protein coat denatures and/or disassembles such that the nucleic acid is exposed. The identifier may also be introduced into the phage, such as by electroporation, electrophoresis, and/or any other appropriate method.

[0023] Other methods of peptide selection may include, but are not limited to, mRNA display, ribosome display, and/or any other appropriate peptide display method or combination thereof.

[0024] In another aspect of the invention, methods for handling and sorting the resultant sequences of a multiplexed binding process are provided. In some embodiments, the sequences may be sorted by identifier sequences to establish which target or targets the sequence bound. The sequences may further be compared, aligned and/or otherwise processed to identify features, characteristics and/or other useful properties, relationships to each other, and/or target properties.

[0025] In a further aspect of the invention, methods for monitoring and/or controlling the diversity of the library of biomolecules may be utilized. For example, too few rounds of selection may result in a biomolecule pool with too many weak binding members while too many rounds of selection may result in only a few binding members, such as members corresponding to only a few targets rather than members corresponding to all of the targets present. In one embodiment, Cot analysis may be employed to measure and/or monitor the diversity of the library of biomolecules through multiple rounds of selection. Cot, or Concentration×time, analysis measures the annealing time of particular oligonucleotides while in solution with other nucleic acids, such as the members of the library of biomolecules. In general, the annealing time will be faster the lower the diversity of the library.

[0026] The present invention together with the above and other advantages may best be understood from the following detailed description of the embodiments of the invention illustrated in the drawings.

### BRIEF DESCRIPTION OF THE FIGURES

[0027] FIG. 1 illustrates an embodiment of a multiple target array;

[0028] FIG. 2 illustrates the application of a library of biomolecules to a target array;

[0029] FIG. 2a illustrates the binding of members of a library of biomolecules to a target spot;

[0030] FIGS. 3 and 3a illustrate embodiments of biomolecule library members;

[0031] FIG. 3b illustrates an embodiment of an identifier;

[0032] FIG. 4 illustrates the tagging of a library member bound to target with an identifier;

[0033] FIG. 4a illustrates a tagged library member product;

[0034] FIG. 5 illustrates a target spot with nearby identifiers on a substrate;

[0035] FIG. 5a illustrates the application of an identifier sheet to a target array;

[0036] FIGS. 6, 6a, 6b and 6c illustrate embodiments of identifiers and ligation of identifiers to a library member;

[0037] FIGS. 7 and 7a illustrate phage display for a target;

[0038] FIG. 7b illustrates an mRNA display fusion product;

[0039] FIG. 7c illustrates a ribosome display fusion product; and

[0040] FIG. 8 illustrates an example of a histology section target.

### DETAILED DESCRIPTION OF THE INVENTION

[0041] The detailed description set forth below is intended as a description of the presently exemplified methods, devices, and compositions provided in accordance with aspects of the present invention and is not intended to represent the only forms in which the present invention may be practiced or utilized. It is to be understood, however, that the same or equivalent functions and components may be accomplished by different embodiments that are also intended to be encompassed within the spirit and scope of the invention.

[0042] Unless defined otherwise, all technical and scientific terms used herein have the same meaning as commonly understood to one of ordinary skill in the art to which this invention belongs. Although any methods, devices and materials similar or equivalent to those described herein can be used in the practice or testing of the invention, the exemplified methods, devices and materials are now described.

[0043] The present invention relates functional ligands to target molecules, particularly to functional nucleic acids and modifications thereof, and to methods for simultaneously generating, for example, numerous different functional biomolecules, particularly to methods for generating numerous different functional nucleic acids against multiple target molecules simultaneously. The present invention further relates to functional ligands which bind with affinity to target molecules. The present invention further relates to methods for simultaneously generating different functional biomolecules, particularly to functional nucleic acids, that bind with functional activity to another biomolecule, such as a receptor molecule.

[0044] In general, a method for generating functional biomolecules includes obtaining a library, such as a diverse or randomized library, of biomolecules. Biomolecules may generally include nucleic acids, particularly single-stranded nucleic acids, peptides, other biopolymers and/or combinations or modifications thereof. A library of biomolecules may include nucleic acid sequences, such as ribonucleic acid (RNA), deoxyribonucleic acid (DNA), artificially modified nucleic acids, and/or combinations thereof. In general, modified nucleic acid bases may be utilized and may include, but are not limited to, 2′-Deoxy-P-nucleoside-5′-Triphosphate, 2′-Deoxyinosine-5′-Triphosphate, 2′-Deoxypseudouridine-5′-Triphosphate, 2′-Deoxyuridine-5′-Triphosphate, 2′-Deoxyzebularine-5′-Triphosphate, 2-Amino-2′-deoxyadenosine-5′-Triphosphate, 2-Amino-6-chloropurine-2′-deoxyriboside-5′-Triphosphate, 2-Aminopurine-2′-deoxyribose-5′-Triphosphate, 2-Thio-2′-deoxycytidine-5′-Triphosphate, 2-Thiothymidine-5′-Triphosphate, 2′-Deoxy-L-adenosine-5′-Triphosphate, 2′-Deoxy-L-cytidine-5′-Triphosphate, 2′-Deoxy-L-guanosine-5′-Triphosphate, 2′-Deoxy-L-thymidine-5′-Triphosphate, 4-Thiothymidine-5′-Triphosphate, 5-Aminoallyl-2′-deoxycytidine-5′-Triphosphate, 5-Aminoallyl-2′-deoxyuridine-5′-Triphosphate, 5-Bromo-2′-deoxycytidine-5′-Triphosphate, 5-Bromo-2′-deoxyuridine-5′-Triphosphate, 5-Fluoro-2′-deoxyuridine-5′-Triphosphate, and/or any other appropriate modified nucleic acid base. It may generally be understood that the nucleoside triphosphates (NTPs) listed above may generally refer to any appropriate phosphate of the modified base, such as additionally, for example, monophosphates (NMPs) or diphosphates (NDPs) of the base. The method for generating functional biomolecules further includes contacting the library of biomolecules with at least one target, such as, for example, a molecular target, material and/or substance. In general, the members of the library that do not bind with some affinity to the target may be washed or otherwise partitioned from the remainder of the library, which may have a given level of binding affinity to the target. The process may be repeated to partition the strongest binding members of the library. Amplification of the biomolecules may also be utilized to increase the numbers of the binding members of the library for subsequent repetitions and for isolation and/or purification of any final products of the process. Embodiments of the SELEX method may generally be utilized to achieve the generation of functional biomolecules of a given binding affinity. The basic SELEX protocol and aptamers are described in U.S. Pat. No. 5,270,163, entitled “Methods for identifying nucleic acid ligands,” the entire contents of which are hereby incorporated by reference.

[0045] In one exemplary aspect of the invention, generation of functional biomolecules may be performed against multiple targets simultaneously within a single system, such as the generation of functional nucleic acid ligands within a single reaction volume. In general, a plurality of targets may be disposed within in a single reaction volume and a library of biomolecules, such as a nucleic acid library, may be applied to the reaction volume. The targets may be, for example, proteins, cells, small molecules, biomolecules, and/or combinations or portions thereof. The members of the library that do not bind to any of the plurality of targets under given conditions may then be partitioned, such as by washing. The remaining members of the library may then be marked and/or tagged, such as to identify the particular target or targets to which the member of the library binds. The binding members of the library may then be isolated and, by virtue of the marking or tagging, be matched to a particular target or targets. This may be desirable as high capacity, multiplexed identification procedures may save time, expense, and physical space for the process over single target identification processes. The present method may also be desirable as it may be utilized to identify and/or eliminate molecules that bind to multiple targets.

[0046] In an exemplary embodiment, a plurality of target molecules are affixed to a substrate within a single reaction volume, such as, for example, by attaching the targets to a substrate of an array. As illustrated in FIG. 1, the targets may be disposed with multiple copies of each target, such as target molecules, in clusters or “spots” 110 on the substrate 102 of an array 100 such that a given array 100 may have an ordered deposition of targets on the substrate 102, with each target identifiable by the location of a particular spot 110 on the substrate 102. Each spot 110 may be a unique target or there may be multiple spots 110 of at least one target on a given array 100. In general, high content target arrays, such as high content protein or antibody arrays, may be utilized. A library 200 of, for example, nucleic acids 202 may then be applied A to array 100, as illustrated in FIG. 2. Particular members 204 of the library 200 may then bind to target spots 110, such as illustrated in FIG. 2a. The non-binding members 206 of the library 200 may be partitioned or washed off the array 100. The binding and washing steps may be repeated and may also utilize an amplification step to generate additional copies of any remaining binding members 204 of the library 200. The array 100 may then be marked or tagged with a plurality of identifiers, such as, for example, a plurality of oligonucleotides which may universally bind through Watson-Crick interactions to the members of the library of, for example, nucleic acids. In one embodiment, each member 202 of the library 200 may include a potential binding sequence 202a and at least one conserved region 202b which may bind an identifier oligonucleotide, such as illustrated in FIG. 3. A further conserved region 202c may also be included to facilitate priming for amplification reactions, such as Polymerase Chain Reaction (PCR), as illustrated in FIG. 3a. In general the conserved regions 202b, 202c may flank the potential binding sequence 202a, such as to facilitate priming for amplification. An identifier 302 may then include a unique or semi-unique sequence 302a, such as illustrated in FIG. 3b, which may be utilized to correspond to the spots 110 and thus the targets of the array 100 by location of the a spot 110 on the substrate 102. The identifiers 302 may further include conserved region 302b which may bind to the conserved region 202b of the library members 202 by Watson-Crick base pairing. The identifiers 302 may also include a further conserved region 302c which may facilitate priming for amplification. The identifiers 302 may be, for example, applied to the spots 110 by printing, for example, inkjet printing, using micro-contact pins, and/or otherwise applying solutions containing identifiers 302 to the substrate 102 of the array 100, such as, for example, by pipetting or the like, onto the spots 110. A library member 202 bound to a target spot 110 may then be tagged with an identifier 302 via base pairing B at regions 202b, 302b, as illustrated in FIG. 4. Thus, the nucleic acids 202 bound to a particular target spot 110 may be identified by the sequence 302a of the identifier 302. In an exemplary embodiment, nucleic acid amplification, such as PCR, may be utilized to generate copies of the members 202 bound to the spots 110, incorporating the identifier sequence 302a (or more its complementary sequence) into the product 203, as illustrated in FIG. 4a. This may be desirable for associating a given member 202 with a target or targets 110 while preserving the particular sequence of the member 202. This may be particularly desirable for resolving multiple binders to a single target or members of the library that bind to multiple targets. Subsequent amplifications may utilize primers for the sequences 202c, 302c such that only the products 203 containing both the sequences 202a, 302a are amplified. It may be understood that references to nucleic acid sequences, such as above, may generally refer to either a particular sequence or the corresponding complementary nucleic acid sequence. In general, it may be desirable for single droplets and/or otherwise separated volumes of solutions containing identifiers 302 for each spot 110 on the array 100 such that the possibility of mistagging may be reduced.

[0047] In one aspect, the identifiers may be printed on all the targets. In another aspect, the identifiers may be printed only on targets with bound biomolecules.

[0048] In another embodiment, a histology section, such as the section 110″ on substrate 102″ of histology slide 100″ in FIG. 8, may be utilized as a target set. The section 110″ may be, for example, a tissue section, a cell mass, and/or any other appropriate biological sample which may generally have structurally significant features. As with the array 100, a library of biomolecules, such as nucleic acids, may be applied which may bind to specific locations on the section 110″, the locations on which may, for example, represent separate targets to generate affinity binding nucleic acids. Identifiers may then be disposed on the slide 100″ as described above, or as in the embodiments below, such that identifiers may be utilized to correspond to specific features of the section 110″.

[0049] In other embodiments, identifiers may be predisposed on the array substrate in substantial proximity to the spots, such as illustrated with identifiers 302 disposed on substrate 102 in proximity to spot 110 in FIG. 5, such that they may bind to nucleic acids bound to the target spots. The identifiers may, for example, be covalently attached to the substrate. In some embodiments, the attachments may be controllably breakable or cleavable such that the identifiers may be released from the substrate such that they may, for example, more easily bind to the bound nucleic acids on the spots.

[0050] In further embodiments, identifiers may be synthesized in situ on the array, such as by light directed in situ nucleic acid synthesis. Appropriately sequenced identifiers may then be synthesized in proximity to particular spots such that the newly synthesized identifiers may bind to the nucleic acids bound to the spot.

[0051] In still other embodiments, identifiers may be disposed and/or synthesized on a separate substrate, such as a membrane, in a spatial disposition that matches the spatial disposition of spots on the array. FIG. 5a illustrates an example of an identifier sheet 100′ with membrane 102′ which may include identifier spots 110′ which may substantially correspond to target spots 110 of the array 100. The identifier sheet 100′ may then be contacted C with the array 100 with locational matching of the target spots 110 with identifier spots 110′. The identifiers may then bind to the nucleic acids bound to the target spots. Any appropriate method of facilitating binding may be utilized, such as, for example, actions to drive migration of the identifiers to the array, such as capillary action, electrophoresis, pressure, gravitational settling, and/or any other appropriate method or combination thereof.

[0052] In some embodiments, the membrane may be soluble and/or substantially erodible. For example, the membrane may include a film forming and/or soluble material. Identifiers and/or other materials, such as components of a nucleic acid amplification or ligation reaction, may be included such that a film is formed containing the desired materials. The membrane may then be applied to the substrate and a suitable solvent, such as water or ethanol, may be utilized to dissolve and/or erode the film, which may then release the included materials, such as the identifiers, to the substrate. Suitable materials for the film may include hydrophilic materials including polysaccharides such as carrageenan, chondroitin sulfate, glucosamine, pullulan, soluble cellulose derivatives such as hydroxypropyl cellulose and hydroxymethyl cellulose, polyacrylic acid, polyvinyl alcohol, polyethylene glycol (PEG), polyethylene oxide (PEO), ethylene oxide-propylene oxide co-polymer, polyvinylpyrrolidone (PVP), polycaprolactone, polyorthoesters, polyphosphazene, polyvinyl acetate, and polyisobutylene.

[0053] The membrane may further be adapted to have a desirable rate of erosion and/or dissolution. The rate may be modified by the inclusion of hydrophobic and/or less soluble additives. Suitable materials may include, but are not limited to, those from the family of quaternary ammonium acrylate/methacrylate copolymers, (Eudragit RS), cellulose and its lower solubility derivatives, such as butyl cellulose, hydroxybutyl cellulose and ethylhydroxyethyl cellulose, high molecular weight PEG or PEO or a combination thereof.

[0054] In yet still other embodiments, the array substrate may be physically divided and/or partitioned for separate collection of the nucleic acids bound to the spots. The spots may, for example, also be controllably removable from the substrate such that they may be individually recovered and sorted. The array itself may also be perforated and/or otherwise easily and/or conveniently partitionable.

[0055] In another embodiment, identifiers may be ligated to the bound nucleic acids. For example, a nucleic acid ligase may be utilized to covalently link an identifier sequence to the bound nucleic acid. In general, nucleic acid ligases are enzymes that covalently join two nucleic acids by catalyzing the formation of phosphodiester bonds at the ends of the phosphate backbone of the nucleic acids. Examples of appropriate nucleic acid ligases may include, but are not limited to, E. coli DNA ligase, T4 DNA ligase, T4 RNA ligase, strand break DNA repair enzymes, and/or any other appropriate ligase, modified enzyme, and/or a combination thereof. In general the ligase utilized may be selected based on the form of ligation performed, such as ligation of blunt ends, compatible overhang (“sticky”) ends, single stranded DNA, singe stranded RNA and/or any other form of ligation. Further in general, the steps in ligating two nucleic acids together is a one step process that may be carried out at or near room temperature. Further nucleic acid fragments may be utilized to facilitate ligase action, such as appropriate complementary fragments that may aid the formation of a substantially double-stranded nucleic acid complex compatible with a ligase. In general, double stranded ligation may be employed and may utilize substantially compatible overhang fragments to facilitate ligation, or also blunt end ligation may be utilized, such as with either the nucleic acid end or the identifier having a phosphorylated end while the other is unphosphorylated for ligation. Single stranded ligation may also be employed.

[0056] Photo ligation may also be employed. Photo ligation may, for example, include covalently linking adjacent nucleic acids by application of electromagnetic energy, such as ultraviolet or visible light. Coupling agents may also be utilized to facilitate the formation of covalent linkages.

[0057] In some embodiments, dyes may be included into the identifiers. In one aspect, the identifiers may be doped with dyes. In another aspect, the identifier solutions may be mixed with dyes. According to one embodiment, the dyes may be photosensitive and may be fluorescent. According to another embodiment, the dyes maybe photosensitive and may be phosphorescent.

[0058] The substrates used may be glass, ceramic or polymeric, as long as their surfaces promote adhesion between the substrates and the targets. Polymers may include synthetic polymers as well as purified biological polymers. The substrate may also be any film, which may be non-porous or macroporous.

[0059] The substrate may be generally planar and may be of any appropriate geometry such as, for example, rectangular, square, circular, elliptical, triangular, other polygonal shape, irregular and/or any other appropriate geometry. The substrate may also be of other forms, such as cylindrical, spherical, irregular and/or any other appropriate form.

[0060] Appropriate ceramics may include, for example, hydroxyapatite, alumina, graphite and pyrolytic carbon.

[0061] Appropriate synthetic materials may include polymers such as polyamides (e.g., nylon), polyesters, polystyrenes, polyacrylates, vinyl polymers (e.g., polyethylene, polytetrafluoroethylene, polypropylene and polyvinyl chloride), polycarbonates, polyurethanes, poly dimethyl siloxanes, cellulose acetates, polymethyl methacrylates, ethylene vinyl acetates, polysulfones, nitrocelluloses and similar copolymers. These synthetic polymers may be woven or knitted into a mesh to form a matrix or similar structure. Alternatively, the synthetic polymer materials can be molded or cast into appropriate forms.

[0062] Biological polymers may be naturally occurring or produced in vitro by fermentation and the like or by recombinant genetic engineering. Recombinant DNA technology can be used to engineer virtually any polypeptide sequence and then amplify and express the protein in either bacterial or mammalian cells. Purified biological polymers can be appropriately formed into a substrate by techniques such as weaving, knitting, casting, molding, extrusion, cellular alignment and magnetic alignment. Suitable biological polymers include, without limitation, collagen, elastin, silk, keratin, gelatin, polyamino acids, polysaccharides (e.g., cellulose and starch) and copolymers thereof.

[0063] Any suitable substrate may be susceptible to adhesion, attachment or adsorption by targets. The susceptibility may be inherent or modified. In one example, the surfaces of substrates may be susceptible to adhesion, attachment or adsorption to proteins. In another example, the surfaces of substrates may be susceptible to adhesion, attachment or adsorption to proteins and not to nucleic acids.

[0064] In one exemplary embodiment, a glass substrate may have a layer or coating of a material that promotes adhesion with targets, such as proteins, materials that maybe charged, such as those that are positively charged, for binding target materials. Examples of charged materials include cellulosic materials, for example, nitrocellulose, methylcelluose, ethylcellulose, carboxymethyl cellulose, hydroxyethyl cellulose, methylhydroxypropyl cellulose; epoxies, PVDF (polyvinylidene fluoride); partially or fully hydrolyzed poly(vinyl alcohol); poly(vinylpyrrolidone); poly(ethyloxazoline); poly(ethylene oxide)-co-poly(propylene oxide) block copolymers; polyamines; polyacrylamide; hydroxypropylmethacrylate; polysucrose; hyaluronic acid; alginate; chitosan; dextran; gelatin and mixtures and copolymers thereof.

[0065] In another exemplary embodiment, if the substrate is not susceptible for attachment by charged materials, or may be susceptible only for attachment by wrongly charged materials, some areas of the substrate may have adhesives, binding agents, or similar attached, adsorbed or coated thereon. Examples of adhesives may include any suitable adhesives that bind the charged materials.

[0066] The targets may be present on the substrate discretely or in clusters. The distance between the discrete targets may be close or may be far apart and may usually be of different targets. Clusters may be used for multiple spots of a single target.

[0067] In one embodiment, the substrate may be macroporous. Macroporous substrates may be desirable, for example, if the different targets are very close together. When the targets are close by, there may not be sufficient distance between different targets to distinguish which target a biomolecule may be binding to. Closely packed targets may increase the efficiency of the generating of biomolecules. A macroporous substrate may be suited for balancing between efficiency and separation. For a macroporous substrate, the walls of the pores may be sufficient to separate even closely packed targets if the pores are large enough to enable the binding process to occur within the pores.

[0068] Also, for macroporous substrates, the pores may have an average diameter greater than the average size of the target material such that the target material may enter or partly enter the pores to anchor. Hydrogels may also be useful for binding or anchoring targets to the pores. Hydrogels may also fill the pores under fluid conditions and present a smooth surface for fluid flow while at the same time may keep the fluid from flowing through the pores.

[0069] The plurality of targets may be arranged in any appropriate manner such as, for example, in circular or elliptical spots, square or rectangular spots, stripes, concentric rings and/or any other appropriate arrangement on the subject.

[0070] According to one exemplary embodiment, the substrate may be at ambient temperature throughout.

[0071] According to another exemplary embodiment, the substrate may include a temperature affecting system that generally produces at least one desired temperature on the surface of the substrate and the adjacent fluid. The desired temperature may facilitate the biomolecule generating process.

[0072] According to a further exemplary embodiment, the substrate may include a temperature affecting system for producing a range of desired temperatures on the surface of the substrate and the adjacent fluid. This may be particularly useful when employing a set of targets having a significant range of, for example Tms, or melting temperatures. In one embodiment, the system may include a plurality of temperature affecting devices that are in thermal communication with the substrate. The plurality of devices may generally be disposed such that they may each produce a desired temperature in a given locality on the surface of the substrate. The set of targets may also be distributed on the surface of the substrate such that the temperature at the location of a target is substantially at the Tm of the target.

[0073] Temperature affecting devices may be any appropriate device that may substantially produce a desired temperature on a substrate and may include, but are not limited to, thermoelectric devices such as Peltier junction devices, semiconductor heating devices, resistive heating devices, inductive heating devices, heating/cooling pumps, electromagnetic radiation sources and/or any other appropriate devices. Temperature may also be affected by other systems, such as, for example, fluid flows including, but not limited to, water flows, air flows, and/or any other appropriate fluid flows.

[0074] In an exemplary embodiment, a plurality of Peltier junction devices may be utilized to generate desired temperatures at localities on the surface of the substrate. Peltier junction devices are particularly useful since they are able to both heat and cool using electrical current. This enables Peltier junction devices to generate temperatures above and below the ambient temperature of a system. They may also be useful in maintaining given temperature conditions at a steady state by adding and removing heat as necessary from the system.

[0075] In general, the placement of the temperature affecting devices may determine the temperature profile on the surface of the substrate and the adjacent fluid in the chamber. The temperature affecting devices may thus be disposed at appropriate positions such that given temperatures may be produced and maintained at known positions on the substrate.

[0076] The substrate may in general have a given thermal conductivity such that the application of at least one temperature affecting device may substantially generate a temperature gradient profile on the surface of the substrate. In general, the temperature on the surface of the substrate may change as a function of the distance from the position of the at least one temperature affecting device. Substrate materials with a relatively low thermal conductivity may generally produce highly localized temperature variations around a temperature affecting device. Substrate materials with a relatively high thermal conductivity may generally produce more gradual variations in temperature over a given distance from a temperature affecting device. It may be understood that at steady state, the effect of the thermal conductivity of the substrate may not contribute to the temperature profile of the system.

[0077] In some embodiments, at least one temperature affecting device may be utilized to produce a particular temperature gradient profile on the surface of the substrate. In general, a temperature gradient may be generated by utilizing at least one temperature affecting device producing a temperature different from the ambient temperature of the system. Multiple temperature affecting devices with at least two producing different temperatures may be utilized to generate a temperature gradient without reliance on the ambient temperature of the system.

[0078] The positions and temperatures of multiple temperature affecting devices may be utilized to calculate a resulting temperature gradient profile on the surface of a substrate using standard heat transfer equations. An algorithm may then be utilized to calculate the optimal positions and/or temperatures for a plurality of temperature affecting devices to produce a desired temperature gradient profile on the surface of a substrate. The algorithm may be, for example, applied using a computational assisting system, such as a computer and or other calculatory device. This may be performed to tailor a temperature gradient profile to a particular substrate with a known disposition of targets of known and/or calculated Tm. Similarly, a set of targets of known and/or calculated Tm may be arranged on a substrate based on a temperature gradient profile. This may be desirable as placement of a target at a given location on a substrate may be accomplished more easily than tailoring a temperature profile to pre-existing locations of targets on a substrate. In general, a target may be disposed on the substrate at a temperature address within the temperature profile gradient. The temperature address may, for example, be substantially at the Tm of the target during operation of the molecular hybridization system, and/or any other appropriate temperature.

[0079] In another aspect, the molecular hybridization system includes an adjustable system for generating a temperature profile. The adjustable system generally includes a plurality of temperature affecting devices, each affecting the temperature at a particular location of a substrate.

[0080] Details of the temperature affecting systems may be found in, for example, U.S. utility patent application Ser. No. 12/249,525, filed on Oct. 10, 2008, entitled “METHODS AND DEVICES FOR MOLECULAR ASSOCIATION AND IMAGING”, the contents of all of which are hereby incorporated by reference.

[0081] FIG. 6 illustrates an example of an identifier sequence 302 and a complement identifier sequence 402. The complement sequence 402 may include a complement identifier region 402a which may be substantially complementary to identifier region 302a such that they may base pair bind. The complement sequence 402 may further include a primer region 402c which may also be complementary to primer region 302c of the identifier 302. Further, the complement sequence 402 may include a compatible end 402b which may be compatible with ligation to the end of another nucleic acid. As shown in FIG. 6a, a nucleic acid library member 202 may be bound to a spot 110. An identifier 302 and a complement sequence 402 may then be applied to the member 202 such that the identifier 302 binds to the member 202 at region 202b, 302b. The complement sequence 402 may bind to the identifier 302 at regions 302a/402a, 302c/402c. The compatible end 402b may then be ligated to the end D of the member 202 by an appropriate ligase and/or other appropriate method. A product 203′, as illustrated in FIG. 6b, may then be generated including the primer region 202c, binding sequence 202a, region 202b, complement identifier region 402a, and complement primer region 402c. The product 203′ may then be amplified, such as with the product 203 discussed above in FIG. 4a. The product 203′ may also be generated by single-stranded ligation of the member 202 and the complement sequence 402, where in general the either the member 202 or the complement sequence 402 may have a phosphorylated end while the other may be unphosphorylated for end to end ligation.

[0082] In another example, as illustrated in FIG. 6c, a further complementary fragment 502 may be included that may base pair bind to a complementary region 202d of the nucleic acid library member 202. This may be desirable as some nucleic acid ligases may generally join double stranded nucleic acids. The addition of the complementary fragment 502 may generally generate a substantially double stranded nucleic acid, such as illustrated spanning from region 302c to the end of complementary fragment 502. There may further be a double stranded “break” at points D and E. In general, the sizing of the fragments may be tailored to generate a suitably long stretch of double stranded nucleic acid for ligase action. In general, the complementary region 202d may be the same for all members 202 of the library 200 such that the same complementary fragment 502 may be utilized, such as, for example, convenience, cost and/or ease of use.

[0083] In general, methods may be applied that may facilitate binding or other interactions between the identifiers and the nucleic acids bound to the spots. For example, the temperature may be increased to dissociate the nucleic acids from the spots. The temperature may subsequently be lowered such that, for example, base pairing may occur between the nucleic acids and the identifiers. Temperature changes may also, for example, denature the target such that the nucleic acids may no longer bind and/or bind with lower affinity to the targets. This may be desirable in that it may aid in binding of the nucleic acids to the identifiers.

[0084] In a further aspect of the invention, methods for monitoring and/or controlling the diversity of the library of biomolecules may be utilized. For example, too few rounds of selection may result in a biomolecule pool with too many weak binding members while too many rounds of selection may result in only a few binding members, such as members corresponding to only a few targets rather than members corresponding to all of the targets present. In one embodiment, Cot analysis may be employed to measure and/or monitor the diversity of the library of biomolecules through multiple rounds of selection. Cot, or Concentration×time, analysis measures the annealing time of particular oligonucleotides while in solution with other nucleic acids, such as the members of the library of biomolecules. In general, the annealing time will be faster the lower the diversity of the library.

[0085] In one embodiment, a Cot-standard curve for measuring the sequence diversity of the aptamer library at any point during the multiplex SELEX process may be utilized. For example, a group of DNA oligonucleotides with a 5′- and 3′-constant region of ˜20 bases identical to the initial SELEX library may be utilized. The oligos may then be converted to dsDNA by standard methods. Briefly, after annealing a primer to the oligos, Exo-minus Klenow Taq polymerase (Epicentre, Madison, Wis.) may be used in conjunction with dNTPs to fill in the ssDNA to create a dsDNA or mixture thereof. Using a standard quantitative PCR thermal cycler, a temperature profile for melting and controlled annealing of each DNA mixture may be programmed. Standard SYBR Green I specific for double-stranded DNA (dsDNA) may be utilized to report the amount of re-annealed dsDNA. At one extreme, the annealing time for a single sequence will be measured. At the other extreme, the annealing time for the initial SELEX pool, such as containing approximately 1 nmol of sequence diversity, may be measured. Annealing times of intermediate diversity may also be measured to establish a very specific Cot-standard-curve for the SELEX library. Using this standard curve, at any point during SELEX, the sequence diversity of the evolving library of aptamers may be determined by comparison to the curve.

[0086] In a further embodiment, a method for generating functional biomolecules includes obtaining a library of peptide sequences and contacting the library with a plurality of targets. In some embodiments, the peptide sequence may be tagged, linked, marked and/or otherwise associated with a nucleic acid sequence. The nucleic acid sequence may be, for example, representative of the sequence of the peptide. For example, the nucleic acid may substantially encode the peptide sequence. Also for example, the nucleic acid may be a unique or semi-unique identifier sequence. The nucleic acid sequence may then be utilized to bind another identifier, as described above, such that a peptide bound to a target may be tagged or marked as to which target it bound.

[0087] In an exemplary embodiment, a bacteriophage (phage) may be generated that includes a peptide sequence of interest in its protein coat. The phage may further include a nucleic acid sequence that may be representative of the peptide sequence within the nucleic acid of the phage. The phage may then be contacted with a plurality of targets, as above. This may generally be referred to as phage display. Phages employed may include, but are not limited to, M13 phage, fd filamentous phage, T4 phage, T7 phage, λ phage, and/or any other appropriate phage. Non-binding phages may be washed and/or partitioned, while binding phages may be tagged or marked with identifiers, as above. As phage nucleic acids are generally contained within the protein coat of the phage, the nucleic acid may generally be exposed for binding to the identifier. For example, the phage may be heated such that the protein coat denatures and/or disassembles such that the nucleic acid is exposed. The identifier may also be introduced into the phage, such as by electroporation, electrophoresis, and/or any other appropriate method.

[0088] In FIG. 7, an example of a phage 600 may include a nucleic acid 610 which may generally encode, among other things, and be encapsulated by a protein coat 602, which may contain a binding region for a target 110. The nucleic acid 610 may further include a region 612 which may identify the phage and/or encode the binding region for a target. A bound phage 600, as illustrated in FIGS. 7 and 7a, may then be heated, disrupted and/or otherwise treated such that an identifier 302 may contact F the region 612. For example, the protein coat 602 may be broken and/or otherwise disrupted for entry of the identifier 302. In general, an amplification reaction and/or other method, such as those discussed above, may be utilized to tag, mark and/or otherwise introduce identifier information to the sequence of region 612. Further in general, the identifier 302 and region 612 may incorporate any, all or a combination of the elements discussed above in regards to nucleic acid library members, identifiers and/or other nucleic acid fragments. As also discussed above, the phage 600 may also be physically removed and/or partitioned in a manner that may preserve the identity of the target 110 the phage 600 was associated.

[0089] In other embodiments, other methods of incorporating and/or linking nucleic acids to peptides may be utilized, such as, for example, mRNA display, ribosome display, and/or any other appropriate method. In general, in mRNA display, as illustrated in FIG. 7b, a fusion product 600′ of a messenger RNA (mRNA) 610′ may be linked to a peptide 602′ that the mRNA 610′ encodes, such as with a puromycin-ended mRNA 612′ which may generally cause fusion of the mRNA 610′ to the nascent peptide 602′ in a ribosome, which may then be contacted with targets such as described above with phage display. Also in general, in ribosome display, as illustrated in FIG. 7c, a fusion product 600″ of a modified mRNA 610″ may be utilized that codes for a peptide 602″, but lacks a stop codon and may also incorporate a spacer sequence 612″ which may occupy the channel of the ribosome 620″ during translation and allow the peptide 602″ assembled at the ribosome 620″ to fold, which may result in the peptide 602″ attached to the ribosome 620″ and also attached to the mRNA 610″. This product 600″ may then be contacted with targets such as described above with phage display. Other methods may include, but are not limited to, yeast display, bacterial display, and/or any other appropriate method.

[0090] In another aspect of the invention, methods for handling and sorting the resultant sequences of a multiplexed binding process are provided. In some embodiments, the sequences may be sorted by identifier sequences to establish which target or targets the sequence bound. The sequences may further be compared, aligned and/or otherwise processed to identify features, characteristics and/or other useful properties, relationships to each other, and/or target properties. For example, it may be expected that multiple aptamer sequences bound to a single target may potentially share sequence motifs and/or other common features which may be at least partially elucidated by sequence sorting and/or comparison. Specific binding affinities of resultant sequences may also be determined through affinity assays. In some embodiments, surface plasmon resonance may be utilized to determine binding of an aptamer to a target. For example, sensors which monitor the refractive index of a surface bound to a target may be utilized, where the refractive index may change as a result of binding of an aptamer to the target. In general, aside from standard sequencing methods, parallel sequencing methods, such as, for example, massively parallel sequencing such as 454 Clonal Sequencing (Roche, Branford, Conn.), massively parallel clonal array sequencing, Solexa Sequencing (Illumina, San Diego, Calif.), and/or any other appropriate sequencing method may be employed.

### Example of Multiplexed SELEX Protocol

[0091] As a demonstration of parallel, de novo selection of aptamers against multiple targets, a combinatorial DNA library containing a core randomized sequence of 40 nts flanked by two nt conserved primer binding sites is used as the starting point for an aptamer pool. The primer sequences are designed and optimized using Vector NTI's (Invitrogen) oligo analysis module. Typically, such a library is expected to contain approximately 10¹⁵ unique sequences. The primer binding sites are used to amplify the core sequences during the SELEX process. The single stranded DNA pool dissolved in binding buffer is denatured by heating at 95° C. for 5 min, cooled on ice for 10 min and exposed to multiple protein targets fixed onto a nitrocellulose coated glass slide (e.g., Whatman).

### Example of DNA Library SELEX

[0092] An example DNA library consists of a random sequence of 40 nucleotides flanked by conserved primers. In the first round of SELEX, 500 pmol of the ssDNA pool is incubated with each slide in binding buffer (PBS with 0.1 mg/ml yeast tRNA and 1 mg/ml BSA) for 30 minutes at 37° C. The slide is then washed in ml of binding buffer for one minute. To elute specifically bound aptamers the slide is heated to 95° C. in binding buffer. The eluted ssDNA is subsequently be precipitated using a high salt solution and ethanol. After precipitation, the aptamer pellet is resuspended in water and amplified by PCR with a 3′-biotin-labeled primer and a 5′-fluorescein (FITC)-labeled primer (20 cycles of 30 sec at 95° C., 30 sec at 52° C., and 30 sec at 72° C., followed by a 10 min extension at 72° C.). The selected FITC-labeled sense ssDNA is separated from the biotinylated antisense ssDNA by streptavidin-coated Sepharose beads (Promega, Madison, Wis.) for use in the next round. Alternatively, “asymmetric PCR” may be utilized for generating a large excess of an intended strand of a PCR product in SELEX procedures. Also alternatively, the undesired strand may be digested by A-exonuclease, such as, for example, when a phosphorylated PCR primer is employed.

[0093] The labeling of individual aptamers with fluorescein isothiocyanate (FITC) facilitates the monitoring of the SELEX procedure. FITC is also compatible with scanning in the green (cy3) channel of standard microarray scanners. The sense primer used to amplify the ssDNA aptamers after each round of selection is fluorescently labeled, resulting in fluorescently labeled aptamers. The protein spotted nitrocellulose-coated slides are scanned in a microarray scanner. Alternatively, proteins may be spotted on epoxy-coated glass slides. While epoxy slides may have less protein binding capacity than 3-D nitrocellulose pads, it has been observed that there may be less non-specific binding of nucleic acid aptamer pools to the background of the slide (blocked or not). Blocking may be employed to reduce background fluorescence.

[0094] In each round of the SELEX process, the slide is incubated for 30 min at 37° C. to allow binding of the aptamers to their targets. The slides are then washed in binding buffer before the specifically bound DNAs are eluted by heating the slide at 95° C. in 7M urea. Nucleic acids from the eluate are phenol-chloroform purified and precipitated, and the concentrated single stranded DNA molecules will be amplified by PCR. In order to increase stringency throughout the SELEX process, the washes are gradually increased in volume (from approximately 1-10 ml). After a given point in the selection, such as, for example, after the final round of selection, the aptamers may be tagged, marked and/or partitioned.

### Example of In Situ Hybridization of Identifiers

[0095] An example of in situ hybridization of identifiers to aptamers was performed with short, ssDNA sequence tags to the 3′ end of aptamers bound to their protein target. These synthetic ssDNA tag oligonucleotides consists of three regions, as illustrated in FIG. 3b with identifier 302: (i) the C2 region, region 302c of the identifier 302, at the 3′ end of the oligonucleotide consists of a 17-20 nucleotide sequence complementary to a corresponding region on all of the used aptamers, (ii) the C1 region, region 302b at the 5′ end of the oligonucleotide 302 contains a 17-20 nt primer binding site, used during the amplification of the tag:aptamer hybrid, prior to sequencing and (iii) a variable region 302a in the center of the tag oligonucleotide (V) that serves a as a unique identifier for each locus on the glass slide surface. A variable sequence of 8 nucleotides will allow 48 (65,536) unique sequences to be generated, sufficient for many complex protein arrays (8000 samples) on the market.

[0096] As outlined above, after the final round of the SELEX procedure (typically, round 10) the specific aptamers are bound to their protein targets, fixed to a glass slide. While the 40 nt core sequence of each aptamer are unique, its terminal sequences have not been subject to any kind of selection during the procedure. After each round of binding to their protein targets, the aptamers were amplified using conserved primers, requiring the maintenance of corresponding regions at their distal ends (P1, P2). The 3′-region of each aptamer, for instance, can thus serve as a binding site (via standard hybridization) for the C2 region of the proposed tag oligonucleotide. Given the unique variable sequence (V) of each tag oligonucleotide, each aptamer will now be tagged with a sequence that can be traced back to the location of the aptamer on the glass slide, and thus the protein spotted at that location.

[0097] It will be appreciated by those of ordinary skill in the art that the present invention can be embodied in other specific forms without departing from the spirit or essential character hereof. The present description is therefore considered in all respects to be illustrative and not restrictive. The scope of the present invention is indicated by the appended claims, and all changes that come within the meaning and range of equivalents thereof are intended to be embraced therein.

The application's sequence listing, which the Patent Office published only in electronic form, follows.

SEQUENCE LISTING (3325 sequences)

SEQ ID NO: 1 - DNA, 32 bp, Artificial sequence
  Artificial aptamer to AFP
ccgggtgggggggtgggaggaggttgcgcata

SEQ ID NO: 2 - DNA, 32 bp, Artificial sequence
  Artificial aptamer to AFP
ccggtgggagggggggagggaggtggaggttt

SEQ ID NO: 3 - DNA, 32 bp, Artificial sequence
  Artificial aptamer to MMP9v
cctggggggcgggtgggtggaaggaaagcgtg

SEQ ID NO: 4 - DNA, 32 bp, Artificial sequence
  Artificial aptamer to MMP9v
cctggggggcgggtgggtggaaggatagcgtg

SEQ ID NO: 5 - DNA, 32 bp, Artificial sequence
  Artificial aptamer to MMP9v
cctggggggcgggtgggtggaagggaagcgtg

SEQ ID NO: 6 - DNA, 32 bp, Artificial sequence
  Artificial aptamer to MMP9v
cctggggggtgggagggtggaaggaaagcgtg

SEQ ID NO: 7 - DNA, 32 bp, Artificial sequence
  Artificial aptamer to MMP9v
cctggggggcgggagggtggaaggaaagcgtg

SEQ ID NO: 8 - DNA, 32 bp, Artificial sequence
  Artificial aptamer to MMP9v
cctggggggcgggagggtggaaggaaggcgtg

SEQ ID NO: 9 - DNA, 32 bp, Artificial sequence
  Artificial aptamer to AFP
cctggtgggcgggagggtggaaggaaagcgtg

SEQ ID NO: 10 - DNA, 32 bp, Artificial sequence
  Artificial aptamer to MMP9v
cctggtgggcgggagggtggagggaaagcgtg

SEQ ID NO: 11 - DNA, 32 bp, Artificial sequence
  Artificial aptamer to IGE
cctgggggcgggagggtgggaaggaaagcgtg

SEQ ID NO: 12 - DNA, 32 bp, Artificial sequence
  Artificial aptamer to AFP
cgaagggagggggggtgggcgttgagctcgga

SEQ ID NO: 13 - DNA, 32 bp, Artificial sequence
  Artificial aptamer to AFP
cgatgagggtgggtgggtggagagttgaagag

SEQ ID NO: 14 - DNA, 32 bp, Artificial sequence
  Artificial aptamer to IGE
cgaatgggctgggagggtgggtaacgagcgta

SEQ ID NO: 15 - DNA, 32 bp, Artificial sequence
  Artificial aptamer to AFP
cgagcgggcgggtgggtggaagtacgcgtttg

SEQ ID NO: 16 - DNA, 32 bp, Artificial sequence
  Artificial aptamer to IGE
cgagggagggagggtgggcaaaagagcaggaa

SEQ ID NO: 17 - DNA, 32 bp, Artificial sequence
  Artificial aptamer to MMP9v
cgagggggtgggagggtggatggtagcggtgg

SEQ ID NO: 18 - DNA, 32 bp, Artificial sequence
  Artificial aptamer to IGE
cgagggtgggtgggtggaaaaggagagttgaa

SEQ ID NO: 19 - DNA, 32 bp, Artificial sequence
  Artificial aptamer to AFP
cgagtgggggggtgggtggaagtacgtgtttg

SEQ ID NO: 20 - DNA, 32 bp, Artificial sequence
  Artificial aptamer to AFP
cgagtgggtgggtgggtggtaaggtgagtgga

SEQ ID NO: 21 - DNA, 32 bp, Artificial sequence
  Artificial aptamer to IGE
cgggagggagggtgggtaatgagctatagaga

SEQ ID NO: 22 - DNA, 32 bp, Artificial sequence
  Artificial aptamer to IGE,MMP9v
cgggagggagggggggtaataagtgcgtcaaa

SEQ ID NO: 23 - DNA, 32 bp, Artificial sequence
  Artificial aptamer to MMP9v
cgggatgggagggtgggcttaaatgagcggag

SEQ ID NO: 24 - DNA, 32 bp, Artificial sequence
  Artificial aptamer to AFP
cggagggagggcgggtggagtcagagcgccga

SEQ ID NO: 25 - DNA, 32 bp, Artificial sequence
  Artificial aptamer to MMP9v
cggagggtgggtgggtggagttgatgggtgag

SEQ ID NO: 26 - DNA, 32 bp, Artificial sequence
  Artificial aptamer to AFP,MMP9v
cggcaggggggtgggtggaggagtgcgtgaag

SEQ ID NO: 27 - DNA, 32 bp, Artificial sequence
  Artificial aptamer to IGE
cggggagggagggcgggcaaatataagcggta

SEQ ID NO: 28 - DNA, 32 bp, Artificial sequence
  Artificial aptamer to IGE
cggggagggagggggggcaaatataagcggta

SEQ ID NO: 29 - DNA, 32 bp, Artificial sequence
  Artificial aptamer to IGE
cggggagggagggggggtaaaaacagcgtaga

SEQ ID NO: 30 - DNA, 32 bp, Artificial sequence
  Artificial aptamer to IGE
cggggagggagggtgggcaagaaatgggcgaa

SEQ ID NO: 31 - DNA, 32 bp, Artificial sequence
  Artificial aptamer to AFP,MMP9v
cgggggagggcgggtggaggtcagagcgccga

SEQ ID NO: 32 - DNA, 32 bp, Artificial sequence
  Artificial aptamer to MMP9v
cgggggagggcgggtggaggtcagagcgctga

SEQ ID NO: 33 - DNA, 32 bp, Artificial sequence
  Artificial aptamer to AFP,IGE
cgggggagggcgggtgggagtcagagcgccga

SEQ ID NO: 34 - DNA, 32 bp, Artificial sequence
  Artificial aptamer to AFP
cgggggagggcgggtgggagttagagcgccga

SEQ ID NO: 35 - DNA, 32 bp, Artificial sequence
  Artificial aptamer to MMP9v
cgggggagggcgggtggagtcagaggcgccga

SEQ ID NO: 36 - DNA, 32 bp, Artificial sequence
  Artificial aptamer to AFP
cggggggaaggcgggtggagtcagagcgccga

SEQ ID NO: 37 - DNA, 32 bp, Artificial sequence
  Artificial aptamer to AFP
cggggggagagcgggtggagtcagagcgccga

SEQ ID NO: 38 - DNA, 32 bp, Artificial sequence
  Artificial aptamer to MMP9v
cgggggccgggcgggtggagtgtgagggataa

SEQ ID NO: 39 - DNA, 32 bp, Artificial sequence
  Artificial aptamer to MMP9v
cgggggcgggcgggtggagtgtgagggatgaa

SEQ ID NO: 40 - DNA, 32 bp, Artificial sequence
  Artificial aptamer to AFP
cggggggagggcgggtgaagtcagagcgccga

SEQ ID NO: 41 - DNA, 32 bp, Artificial sequence
  Artificial aptamer to MMP9v
cggggggagggcgggcggagtcagagcgccga

SEQ ID NO: 42 - DNA, 32 bp, Artificial sequence
  Artificial aptamer to MMP9v
cggggggagggcgggcggagtcagagcgctga

SEQ ID NO: 43 - DNA, 32 bp, Artificial sequence
  Artificial aptamer to MMP9v
cggggggagggcgggcggagttagagcgccga

SEQ ID NO: 44 - DNA, 32 bp, Artificial sequence
  Artificial aptamer to MMP9v
cggggggagggcggggggagtcagagcgccga

SEQ ID NO: 45 - DNA, 32 bp, Artificial sequence
  Artificial aptamer to AFP
cggggggagggcgggtagagtcagagcgccga

SEQ ID NO: 46 - DNA, 32 bp, Artificial sequence
  Artificial aptamer to AFP
cggggggagggcgggtggagtaagagcgccga

SEQ ID NO: 47 - DNA, 32 bp, Artificial sequence
  Artificial aptamer to AFP
cggggggagggcgggtggaatcagagcgccga

SEQ ID NO: 48 - DNA, 32 bp, Artificial sequence
  Artificial aptamer to MMP9v
cggggggagggcgggtggagacagagcgctga

SEQ ID NO: 49 - DNA, 32 bp, Artificial sequence
  Artificial aptamer to MMP9v
cggggggagggcgggtggagccagagcgccga

SEQ ID NO: 50 - DNA, 32 bp, Artificial sequence
  Artificial aptamer to MMP9v
cggggggagggcgggtggagccagagcgctga

SEQ ID NO: 51 - DNA, 32 bp, Artificial sequence
  Artificial aptamer to MMP9v
cggggggagggcgggtggagtcagagcgctga

SEQ ID NO: 52 - DNA, 32 bp, Artificial sequence
  Artificial aptamer to AFP,MMP9v
cggggggagggcgggtggagtcagagcgacga

SEQ ID NO: 53 - DNA, 32 bp, Artificial sequence
  Artificial aptamer to AFP
cggggggagggcgggtggagtcagagcgcaga

SEQ ID NO: 54 - DNA, 32 bp, Artificial sequence
  Artificial aptamer to MMP9v
cggggggagggcgggtggagtcagagcgccaa

SEQ ID NO: 55 - DNA, 32 bp, Artificial sequence
  Artificial aptamer to IGE,MMP9v
cggggggagggcgggtggagtcagagcgccga

SEQ ID NO: 56 - DNA, 32 bp, Artificial sequence
  Artificial aptamer to MMP9v
cggggggagggcgggtggagtctgagcgccaa

SEQ ID NO: 57 - DNA, 32 bp, Artificial sequence
  Artificial aptamer to AFP
cggggggagggcgggtggagtcagtgcgccga

SEQ ID NO: 58 - DNA, 32 bp, Artificial sequence
  Artificial aptamer to MMP9v
cggggggagggcgggtggagtcggagcgccaa

SEQ ID NO: 59 - DNA, 32 bp, Artificial sequence
  Artificial aptamer to MMP9v
cggggggagggcgggtggagtcggagcgccga

SEQ ID NO: 60 - DNA, 32 bp, Artificial sequence
  Artificial aptamer to MMP9v
cggggggagggcgggtggagtcggagcgccgg

SEQ ID NO: 61 - DNA, 32 bp, Artificial sequence
  Artificial aptamer to MMP9v
cggggggagggcgggtggtgtcagagcgccga

SEQ ID NO: 62 - DNA, 32 bp, Artificial sequence
  Artificial aptamer to MMP9v
cggggggagggcgggtggagttagagcgccaa

SEQ ID NO: 63 - DNA, 32 bp, Artificial sequence
  Artificial aptamer to MMP9v
cggggggagggtgggtggaggtgtagcgtgga

SEQ ID NO: 64 - DNA, 32 bp, Artificial sequence
  Artificial aptamer to MMP9v
cggggggagggggggtggagtcagagcgccga

SEQ ID NO: 65 - DNA, 32 bp, Artificial sequence
  Artificial aptamer to IGE
cggggggagggtgggcggagtcagagcgccga

SEQ ID NO: 66 - DNA, 32 bp, Artificial sequence
  Artificial aptamer to IGE
cggggggagggtgggtggtggtgtagcgtgaa

SEQ ID NO: 67 - DNA, 32 bp, Artificial sequence
  Artificial aptamer to IGE
cggggggagggtgggtggagtcagagcgccta

SEQ ID NO: 68 - DNA, 32 bp, Artificial sequence
  Artificial aptamer to MMP9v
cggggggagggtgggtggagtcagagcgctga

SEQ ID NO: 69 - DNA, 32 bp, Artificial sequence
  Artificial aptamer to MMP9v
cggggggagggtgggtggtagggcgcgtgcaa

SEQ ID NO: 70 - DNA, 32 bp, Artificial sequence
  Artificial aptamer to MMP9v
cggggggagggtgggtggtagtgcgcgtgcaa

SEQ ID NO: 71 - DNA, 32 bp, Artificial sequence
  Artificial aptamer to MMP9v
cggggggagggtgggtggtggtgaagcgtgga

SEQ ID NO: 72 - DNA, 32 bp, Artificial sequence
  Artificial aptamer to MMP9v
cggggggagggtgggtggtgtcagagcgccga

SEQ ID NO: 73 - DNA, 32 bp, Artificial sequence
  Artificial aptamer to MMP9v
cggggggaggtcgggtggagtcagagcgacga

SEQ ID NO: 74 - DNA, 32 bp, Artificial sequence
  Artificial aptamer to AFP
cggggggcgggcgggtggagtgtgagggatga

SEQ ID NO: 75 - DNA, 32 bp, Artificial sequence
  Artificial aptamer to MMP9v
cggggggcgggcgggtggagtgtgagggatta

SEQ ID NO: 76 - DNA, 32 bp, Artificial sequence
  Artificial aptamer to AFP
cggggggcgggcgggtggagtgtgagtgataa

SEQ ID NO: 77 - DNA, 32 bp, Artificial sequence
  Artificial aptamer to MMP9v
cggggggcgggcgggcggagtgtgagggataa

SEQ ID NO: 78 - DNA, 32 bp, Artificial sequence
  Artificial aptamer to AFP,MMP9v
cggggggcgggcgggtggagagtgagggataa

SEQ ID NO: 79 - DNA, 32 bp, Artificial sequence
  Artificial aptamer to MMP9v
cggggggcgggcgggtggagagtgagggatga

SEQ ID NO: 80 - DNA, 32 bp, Artificial sequence
  Artificial aptamer to MMP9v
cggggggcgggcgggtggagagtgaggggtaa

SEQ ID NO: 81 - DNA, 32 bp, Artificial sequence
  Artificial aptamer to AFP,MMP9v
cggggggcgggcgggtggagtgcgagggataa

SEQ ID NO: 82 - DNA, 32 bp, Artificial sequence
  Artificial aptamer to MMP9v
cggggggcgggcgggtggagtgtgagggataa

SEQ ID NO: 83 - DNA, 32 bp, Artificial sequence
  Artificial aptamer to MMP9v
cggggggcgggtgggtggagtgtagggtttcg

SEQ ID NO: 84 - DNA, 32 bp, Artificial sequence
  Artificial aptamer to AFP
cggggggcgggtgggtggagtgtgagggataa

SEQ ID NO: 85 - DNA, 32 bp, Artificial sequence
  Artificial aptamer to MMP9v
cgggggggagggagggcaaaaatgaggggaaa

SEQ ID NO: 86 - DNA, 32 bp, Artificial sequence
  Artificial aptamer to IGE
cgggggggagggagggcaaatcgagggcataa

SEQ ID NO: 87 - DNA, 32 bp, Artificial sequence
  Artificial aptamer to MMP9v
cgggggggagggcgggtggagtcagagcgcgt

SEQ ID NO: 88 - DNA, 32 bp, Artificial sequence
  Artificial aptamer to MMP9v
cgggggggagggcgggttaaataagagcgaga

SEQ ID NO: 89 - DNA, 32 bp, Artificial sequence
  Artificial aptamer to MMP9v
cgggggggattgggtgggtaaatgaggtgcaa

SEQ ID NO: 90 - DNA, 32 bp, Artificial sequence
  Artificial aptamer to MMP9v
cggggggggggcgggtggagtcagagcgccga

SEQ ID NO: 91 - DNA, 32 bp, Artificial sequence
  Artificial aptamer to AFP
cgggggggtgggagggtggatggtagcggtgg

SEQ ID NO: 92 - DNA, 32 bp, Artificial sequence
  Artificial aptamer to AFP
cggggtgggggggagggcaaaagcgggtacaa

SEQ ID NO: 93 - DNA, 32 bp, Artificial sequence
  Artificial aptamer to MMP9v
cgggtgggcgatgggggaagggaagcgtagag

SEQ ID NO: 94 - DNA, 32 bp, Artificial sequence
  Artificial aptamer to AFP
cgtaaagagggagggggggtgggttacggcgt

SEQ ID NO: 95 - DNA, 32 bp, Artificial sequence
  Artificial aptamer to IGE
cgtagggagggagggagggcaaataaagcgtt

SEQ ID NO: 96 - DNA, 32 bp, Artificial sequence
  Artificial aptamer to IGE
cggtgggagggagggcggaggcgagcgctaat

SEQ ID NO: 97 - DNA, 32 bp, Artificial sequence
  Artificial aptamer to AFP
cggtgggagggagggtggaggcgagcgctaaa

SEQ ID NO: 98 - DNA, 32 bp, Artificial sequence
  Artificial aptamer to AFP
cggtgggagggagggtggaggtgagcgctaat

SEQ ID NO: 99 - DNA, 32 bp, Artificial sequence
  Artificial aptamer to AFP
cggtgggagggggggtggaggcgagcgctaat

SEQ ID NO: 100 - DNA, 32 bp, Artificial sequence
  Artificial aptamer to AFP
cggtgggagggtgggcggagagtgagtggaga

SEQ ID NO: 101 - DNA, 32 bp, Artificial sequence
  Artificial aptamer to AFP
cggtgggagggtgggtggaagtaaaggcggaa

SEQ ID NO: 102 - DNA, 32 bp, Artificial sequence
  Artificial aptamer to AFP
cggtgggagggtgggtggagagtgagtgaaga

SEQ ID NO: 103 - DNA, 32 bp, Artificial sequence
  Artificial aptamer to AFP
cggtgggcgggagggtggagtggatgcggaga

SEQ ID NO: 104 - DNA, 32 bp, Artificial sequence
  Artificial aptamer to AFP
cggtgggcgggcgggtggagagtgagggataa

SEQ ID NO: 105 - DNA, 32 bp, Artificial sequence
  Artificial aptamer to MMP9v
cggtgggcgggcgggtggagtgtgagggataa

SEQ ID NO: 106 - DNA, 32 bp, Artificial sequence
  Artificial aptamer to MMP9v
cggtgggggggagggtggaggggagcgaatcc

SEQ ID NO: 107 - DNA, 32 bp, Artificial sequence
  Artificial aptamer to MMP9v
cggtgggggggagggtggaggggagcgtatcc

SEQ ID NO: 108 - DNA, 32 bp, Artificial sequence
  Artificial aptamer to MMP9v
cggtggggggtgggggggtggatagtaaggcg

SEQ ID NO: 109 - DNA, 32 bp, Artificial sequence
  Artificial aptamer to AFP
cggtgggtgggagggtggaggcgagcgctaat

SEQ ID NO: 110 - DNA, 32 bp, Artificial sequence
  Artificial aptamer to AFP
cggtgggtgggagggtggagtaaaaggcgtta

SEQ ID NO: 111 - DNA, 32 bp, Artificial sequence
  Artificial aptamer to MMP9v
cggtgggtgggagggtggagtagagggcttta

SEQ ID NO: 112 - DNA, 32 bp, Artificial sequence
  Artificial aptamer to MMP9v
cggtgggtgggagggtggagtagagggtgtta

SEQ ID NO: 113 - DNA, 32 bp, Artificial sequence
  Artificial aptamer to AFP
cggtgggtgggagggtggagtagatggcgtta

SEQ ID NO: 114 - DNA, 32 bp, Artificial sequence
  Artificial aptamer to AFP
cggtgggtgggagggtggagtagaaggcgttt

SEQ ID NO: 115 - DNA, 32 bp, Artificial sequence
  Artificial aptamer to MMP9v
cggtgggtgggagggtggagtagagggcgtta

SEQ ID NO: 116 - DNA, 32 bp, Artificial sequence
  Artificial aptamer to AFP
cggtgggtgggagggtggagtagtaggcgtta

SEQ ID NO: 117 - DNA, 32 bp, Artificial sequence
  Artificial aptamer to IGE
cggtgggtgggagggtggagtaggaagcgtta

SEQ ID NO: 118 - DNA, 32 bp, Artificial sequence
  Artificial aptamer to AFP
cggtgggtgggagggtggagttgaaggcgtta

SEQ ID NO: 119 - DNA, 32 bp, Artificial sequence
  Artificial aptamer to AFP
cggtgggtgggagggtggagtataaggcgtta

SEQ ID NO: 120 - DNA, 32 bp, Artificial sequence
  Artificial aptamer to AFP
cggtgggtgggagggtggagtggatgtggaga

SEQ ID NO: 121 - DNA, 32 bp, Artificial sequence
  Artificial aptamer to IGE
cggtgggtgggatgggaggagtgagacgttag

SEQ ID NO: 122 - DNA, 32 bp, Artificial sequence
  Artificial aptamer to MMP9v
cggtgggtgggtgggcggagttgatagggaag

SEQ ID NO: 123 - DNA, 32 bp, Artificial sequence
  Artificial aptamer to IGE
cggtgggttggagggtggagtagaaggcgtta

SEQ ID NO: 124 - DNA, 32 bp, Artificial sequence
  Artificial aptamer to AFP
cggtgtgggagggggggtggaaagatgagtta

SEQ ID NO: 125 - DNA, 32 bp, Artificial sequence
  Artificial aptamer to MMP9v
cgtgggagggagggggggtaaaatgagagtga

SEQ ID NO: 126 - DNA, 32 bp, Artificial sequence
  Artificial aptamer to AFP
cgtgggcgggtgggtggaattgagcggaataa

SEQ ID NO: 127 - DNA, 32 bp, Artificial sequence
  Artificial aptamer to IGE
cgtgggtgggagggtggaagaagagcggcgaa

SEQ ID NO: 128 - DNA, 32 bp, Artificial sequence
  Artificial aptamer to IGE
cgtgggtgggtgggtggaaagggagagttgaa

SEQ ID NO: 129 - DNA, 32 bp, Artificial sequence
  Artificial aptamer to AFP
aactggattgaacggggggtgggtgggtggag

SEQ ID NO: 130 - DNA, 32 bp, Artificial sequence
  Artificial aptamer to IGE
aagaaagggagggcgggagggcttatagcgta

SEQ ID NO: 131 - DNA, 32 bp, Artificial sequence
  Artificial aptamer to AFP,IGE
aagaaagggtgggagggagggcacgagcgtgg

SEQ ID NO: 132 - DNA, 32 bp, Artificial sequence
  Artificial aptamer to IGE
aagaagggagggagggggggtaagggcgcata

SEQ ID NO: 133 - DNA, 32 bp, Artificial sequence
  Artificial aptamer to IGE
aagagggagggtgggtggatttagtggattag

SEQ ID NO: 134 - DNA, 32 bp, Artificial sequence
  Artificial aptamer to IGE
aagagggggggagggagggtataagggcgcgt

SEQ ID NO: 135 - DNA, 32 bp, Artificial sequence
  Artificial aptamer to MMP9v
aagagggagggtgggggggcaggagcggtgaa

SEQ ID NO: 136 - DNA, 32 bp, Artificial sequence
  Artificial aptamer to MMP9v
aagagggggggagggtgggcatagacgtgcag

SEQ ID NO: 137 - DNA, 32 bp, Artificial sequence
  Artificial aptamer to IGE
aagagggggggagggtgggcattgacgtgcag

SEQ ID NO: 138 - DNA, 32 bp, Artificial sequence
  Artificial aptamer to MMP9v
aagagggggggttgggtgggttggagggtgaa

SEQ ID NO: 139 - DNA, 32 bp, Artificial sequence
  Artificial aptamer to MMP9v
aagagggtgggtagggggggtaaaaaagtttg

SEQ ID NO: 140 - DNA, 32 bp, Artificial sequence
  Artificial aptamer to IGE
aagagggtggtgtgggtgggggcaagcgtata

SEQ ID NO: 141 - DNA, 32 bp, Artificial sequence
  Artificial aptamer to MMP9v
aaggagaagtcggtgggggggtgggaggagac

SEQ ID NO: 142 - DNA, 32 bp, Artificial sequence
  Artificial aptamer to AFP
aaggagggggggtgggtggatttgttggttta

SEQ ID NO: 143 - DNA, 32 bp, Artificial sequence
  Artificial aptamer to AFP
aaggagggtgggtggggggatggagcggataa

SEQ ID NO: 144 - DNA, 32 bp, Artificial sequence
  Artificial aptamer to IGE
aaggagggtgggtggggggatggagcggatag

SEQ ID NO: 145 - DNA, 32 bp, Artificial sequence
  Artificial aptamer to MMP9v
aagggagggagggtgggtaggagcgctttgaa

SEQ ID NO: 146 - DNA, 32 bp, Artificial sequence
  Artificial aptamer to IGE
aagggagggagggttgggtaaaaagaagctta

SEQ ID NO: 147 - DNA, 32 bp, Artificial sequence
  Artificial aptamer to AFP
aaaagggagggagggcgggccagcgtaaatcg

SEQ ID NO: 148 - DNA, 32 bp, Artificial sequence
  Artificial aptamer to MMP9v
aaaagggggagggagggggggatcaagcggaa

SEQ ID NO: 149 - DNA, 32 bp, Artificial sequence
  Artificial aptamer to AFP
aaaagggagggagggtgggcaagagcggttct

SEQ ID NO: 150 - DNA, 32 bp, Artificial sequence
  Artificial aptamer to MMP9v
aaaagggagggagggttggggtctagcgtgta

SEQ ID NO: 151 - DNA, 32 bp, Artificial sequence
  Artificial aptamer to IGE
aaaaggggagggagggagggtcaagcggttta

SEQ ID NO: 152 - DNA, 32 bp, Artificial sequence
  Artificial aptamer to AFP,IGE
aaaaggggagggagggggggtcaagcggttta

SEQ ID NO: 153 - DNA, 32 bp, Artificial sequence
  Artificial aptamer to AFP
aaaaggggagggagggggggtcaagcggtttg

SEQ ID NO: 154 - DNA, 32 bp, Artificial sequence
  Artificial aptamer to MMP9v
aaaaggggtgggggggagggcaggtagcgata

SEQ ID NO: 155 - DNA, 32 bp, Artificial sequence
  Artificial aptamer to MMP9v
aaaaggggtggggtgggggggatagcgcgtta

SEQ ID NO: 156 - DNA, 32 bp, Artificial sequence
  Artificial aptamer to IGE
aaacggagggagggtgggtggagtcgcgaggg

SEQ ID NO: 157 - DNA, 32 bp, Artificial sequence
  Artificial aptamer to MMP9v
aaacagggagggggggagggcagaaacgttca

SEQ ID NO: 158 - DNA, 32 bp, Artificial sequence
  Artificial aptamer to IGE
aaacgggagggggggcgggcatacacgtttat

SEQ ID NO: 159 - DNA, 32 bp, Artificial sequence
  Artificial aptamer to IGE
aaagagggagggagggggggtttaatgcggta

SEQ ID NO: 160 - DNA, 32 bp, Artificial sequence
  Artificial aptamer to AFP
aaagagggagggggggcgggcacgagtgtgta

SEQ ID NO: 161 - DNA, 32 bp, Artificial sequence
  Artificial aptamer to IGE
aaagagggtgggagggagggcaaagagcgcat

SEQ ID NO: 162 - DNA, 32 bp, Artificial sequence
  Artificial aptamer to AFP,IGE,MMP9v
aaagagggtgggggggagggcatagggcgtta

SEQ ID NO: 163 - DNA, 32 bp, Artificial sequence
  Artificial aptamer to AFP
aaagggagggagggcgggcaaaacatcggtta

SEQ ID NO: 164 - DNA, 32 bp, Artificial sequence
  Artificial aptamer to IGE
aaagggagggagggggggtagatagtgcgttc

SEQ ID NO: 165 - DNA, 32 bp, Artificial sequence
  Artificial aptamer to MMP9v
aaagggagggaggggtgggtagaaaagtgcaa

SEQ ID NO: 166 - DNA, 32 bp, Artificial sequence
  Artificial aptamer to AFP
aaaggggagggagggtgggcagagcgttgcta

SEQ ID NO: 167 - DNA, 32 bp, Artificial sequence
  Artificial aptamer to AFP
aaagggggcgggcgggtggttttgaacattaa

SEQ ID NO: 168 - DNA, 32 bp, Artificial sequence
  Artificial aptamer to IGE
aaagggggcgggcgggtggttttgaacgttaa

SEQ ID NO: 169 - DNA, 32 bp, Artificial sequence
  Artificial aptamer to IGE
aaagggggggagggagggcaggagcgtcttat

SEQ ID NO: 170 - DNA, 32 bp, Artificial sequence
  Artificial aptamer to AFP
aaagggggtgggtgggtggtataaagcgtaac

SEQ ID NO: 171 - DNA, 32 bp, Artificial sequence
  Artificial aptamer to MMP9v
aaaggggtgggagggttgggctattagcgggt

SEQ ID NO: 172 - DNA, 32 bp, Artificial sequence
  Artificial aptamer to MMP9v
aaagggtcgggggggtgggttgagggtgaatg

SEQ ID NO: 173 - DNA, 32 bp, Artificial sequence
  Artificial aptamer to AFP
aaagggtgggggggagggctaagcaggtgcta

SEQ ID NO: 174 - DNA, 32 bp, Artificial sequence
  Artificial aptamer to IGE
aaagtgggagggggggtagggataaacggtga

SEQ ID NO: 175 - DNA, 32 bp, Artificial sequence
  Artificial aptamer to AFP
aaaggtgggcgggtgggtggattatagtagcg

SEQ ID NO: 176 - DNA, 32 bp, Artificial sequence
  Artificial aptamer to IGE
aaaggtgggcgggtgggtggattatattagcg

SEQ ID NO: 177 - DNA, 32 bp, Artificial sequence
  Artificial aptamer to IGE
aaaggtgggggggtgggtggaatgagtagcgg

SEQ ID NO: 178 - DNA, 32 bp, Artificial sequence
  Artificial aptamer to IGE
aaagtagggtgggagggggggcatatgtgcgt

SEQ ID NO: 179 - DNA, 32 bp, Artificial sequence
  Artificial aptamer to MMP9v
aaagtgggtgggagggtggttatgggcggaca

SEQ ID NO: 180 - DNA, 32 bp, Artificial sequence
  Artificial aptamer to AFP
aaagtgggggggtgggtggcttgatgcgctaa

SEQ ID NO: 181 - DNA, 32 bp, Artificial sequence
  Artificial aptamer to MMP9v
aaagtgggggggtgggtggttgatgggcgtat

SEQ ID NO: 182 - DNA, 32 bp, Artificial sequence
  Artificial aptamer to IGE
aaataaaagggggggagggagggcaagagcgg

SEQ ID NO: 183 - DNA, 32 bp, Artificial sequence
  Artificial aptamer to IGE
aaataagagggggggagggagggcaagagcgg

SEQ ID NO: 184 - DNA, 32 bp, Artificial sequence
  Artificial aptamer to AFP
aaagtgggtgggcgggtggtatgagtgtatga

SEQ ID NO: 185 - DNA, 32 bp, Artificial sequence
  Artificial aptamer to MMP9v
aaatatgggagggagggtgggtaacgcgttca

SEQ ID NO: 186 - DNA, 32 bp, Artificial sequence
  Artificial aptamer to IGE
aaatagggagggagggggggaaaagaagtgaa

SEQ ID NO: 187 - DNA, 32 bp, Artificial sequence
  Artificial aptamer to IGE
aaatagggagggagggggggcagagcgaacaa

SEQ ID NO: 188 - DNA, 32 bp, Artificial sequence
  Artificial aptamer to IGE
aaatagggagggagggggggcagagtttatca

SEQ ID NO: 189 - DNA, 32 bp, Artificial sequence
  Artificial aptamer to IGE
aaataggggagggggggagggcaagcgggtag

SEQ ID NO: 190 - DNA, 32 bp, Artificial sequence
  Artificial aptamer to IGE
aaatcgggtgggagggggggcaaaacgtgaaa

SEQ ID NO: 191 - DNA, 32 bp, Artificial sequence
  Artificial aptamer to AFP
aaatggagggagggtgggtggaatttgagtag

SEQ ID NO: 192 - DNA, 32 bp, Artificial sequence
  Artificial aptamer to MMP9v
aaatggagggagggtgggtggaatttgggtag

SEQ ID NO: 193 - DNA, 32 bp, Artificial sequence
  Artificial aptamer to MMP9v
aaatgggtcgggatgggtgggtagagtgttaa

SEQ ID NO: 194 - DNA, 32 bp, Artificial sequence
  Artificial aptamer to MMP9v
aaatgggtcgggatgggtgggtagagtgttga

SEQ ID NO: 195 - DNA, 32 bp, Artificial sequence
  Artificial aptamer to IGE
aaatggtgggtgggtgggaggaagggctttta

SEQ ID NO: 196 - DNA, 32 bp, Artificial sequence
  Artificial aptamer to IGE
aaatgtgggtagggtgggagggattagcggta

SEQ ID NO: 197 - DNA, 32 bp, Artificial sequence
  Artificial aptamer to IGE
aaattgggagggagggcgggttaaaagcgtta

SEQ ID NO: 198 - DNA, 32 bp, Artificial sequence
  Artificial aptamer to AFP,IGE
aacagggagggagggcgggcaaaagcggaatg

SEQ ID NO: 199 - DNA, 32 bp, Artificial sequence
  Artificial aptamer to IGE
aacagggtgggttgggggggcaaataagtttg

SEQ ID NO: 200 - DNA, 32 bp, Artificial sequence
  Artificial aptamer to AFP
aacgagtgagaacggggggcgggcgggtggag

SEQ ID NO: 201 - DNA, 32 bp, Artificial sequence
  Artificial aptamer to MMP9v
aacggggggggtggggtggagagtagcgtaaa

SEQ ID NO: 202 - DNA, 32 bp, Artificial sequence
  Artificial aptamer to AFP
aacggagggtgggggggtggagatttgatacg

SEQ ID NO: 203 - DNA, 32 bp, Artificial sequence
  Artificial aptamer to AFP
aacgtgggagggtgggtggcaaaaaagcgtaa

SEQ ID NO: 204 - DNA, 32 bp, Artificial sequence
  Artificial aptamer to IGE
aatagggtcgggcgggagggtcaaaacggtga

SEQ ID NO: 205 - DNA, 32 bp, Artificial sequence
  Artificial aptamer to MMP9v
aatagggtggcgtgggtgggggaaagggctta

SEQ ID NO: 206 - DNA, 32 bp, Artificial sequence
  Artificial aptamer to AFP
aatatggggggagggtgggtggaagattagcg

SEQ ID NO: 207 - DNA, 32 bp, Artificial sequence
  Artificial aptamer to MMP9v
aatatagggagggagggcgggcatagcgataa

SEQ ID NO: 208 - DNA, 32 bp, Artificial sequence
  Artificial aptamer to IGE
aatatagggagggagggggggcaaagagtgat

SEQ ID NO: 209 - DNA, 32 bp, Artificial sequence
  Artificial aptamer to MMP9v
aatcgggggggagggagggcaaattacgagca

SEQ ID NO: 210 - DNA, 32 bp, Artificial sequence
  Artificial aptamer to IGE
aatcgggtgggaagggagggaaaaaagtgtaa

SEQ ID NO: 211 - DNA, 32 bp, Artificial sequence
  Artificial aptamer to IGE
aatcagggagggagggggggtaaaagcgtaag

SEQ ID NO: 212 - DNA, 32 bp, Artificial sequence
  Artificial aptamer to AFP,IGE,MMP9v
aatcagggtgggagggggggcaaaaggcgtgg

SEQ ID NO: 213 - DNA, 32 bp, Artificial sequence
  Artificial aptamer to MMP9v
aatcagggtgggtagggaggggcacgcgatta

SEQ ID NO: 214 - DNA, 32 bp, Artificial sequence
  Artificial aptamer to IGE
aatgggagggagggggggtaaaagggaggtta

SEQ ID NO: 215 - DNA, 32 bp, Artificial sequence
  Artificial aptamer to MMP9v
aatgggagggagggggggtaataaaagtgcca

SEQ ID NO: 216 - DNA, 32 bp, Artificial sequence
  Artificial aptamer to IGE,MMP9v
aatgggagggagggggggtagtaaaagtgcca

SEQ ID NO: 217 - DNA, 32 bp, Artificial sequence
  Artificial aptamer to IGE
aatgggagggagggggggttacgcgtggttaa

SEQ ID NO: 218 - DNA, 32 bp, Artificial sequence
  Artificial aptamer to MMP9v
aatgggatgggagggtgggatggtgtttatcg

SEQ ID NO: 219 - DNA, 32 bp, Artificial sequence
  Artificial aptamer to MMP9v
aatgggatgggcgggggggattatacgtttac

SEQ ID NO: 220 - DNA, 32 bp, Artificial sequence
  Artificial aptamer to MMP9v
aatgggggggggtgggtggaatgagagcagga

SEQ ID NO: 221 - DNA, 32 bp, Artificial sequence
  Artificial aptamer to MMP9v
aatgggggtgggtgggcggataaggagggtgt

SEQ ID NO: 222 - DNA, 32 bp, Artificial sequence
  Artificial aptamer to IGE
aatgggggtgggtgggcggataatgagggtgt

SEQ ID NO: 223 - DNA, 32 bp, Artificial sequence
  Artificial aptamer to IGE
aatgggtggttgtgggtgggattgattgcgta

SEQ ID NO: 224 - DNA, 32 bp, Artificial sequence
  Artificial aptamer to MMP9v
aatgggtgggagtgggagggtcaaagcgtttg

SEQ ID NO: 225 - DNA, 32 bp, Artificial sequence
  Artificial aptamer to IGE
aatgggttgggagggtgggtaaaaaacgttta

SEQ ID NO: 226 - DNA, 32 bp, Artificial sequence
  Artificial aptamer to MMP9v
aatgtgggaagggcgggggggaatagcgttga

SEQ ID NO: 227 - DNA, 32 bp, Artificial sequence
  Artificial aptamer to MMP9v
aaggggatgggcgggggggtcaataatgttta

SEQ ID NO: 228 - DNA, 32 bp, Artificial sequence
  Artificial aptamer to MMP9v
aaggggagggtgggggggtcaaaagcgtaaca

SEQ ID NO: 229 - DNA, 32 bp, Artificial sequence
  Artificial aptamer to IGE
aagggggggagggagggcaagataggcgtata

SEQ ID NO: 230 - DNA, 32 bp, Artificial sequence
  Artificial aptamer to IGE
aagggggggagggagggttaaagttttgctgg

SEQ ID NO: 231 - DNA, 32 bp, Artificial sequence
  Artificial aptamer to IGE
aagggggtgggcgggtggaaggaagagcgatg

SEQ ID NO: 232 - DNA, 32 bp, Artificial sequence
  Artificial aptamer to IGE
aaggggggtggtagtgggtgggatctaagcgt

SEQ ID NO: 233 - DNA, 32 bp, Artificial sequence
  Artificial aptamer to MMP9v
aaggggtgggtgggtgggaaggaagagcgata

SEQ ID NO: 234 - DNA, 32 bp, Artificial sequence
  Artificial aptamer to AFP
aaggggtgggagggggggtgagcgtgtcaaaa

SEQ ID NO: 235 - DNA, 32 bp, Artificial sequence
  Artificial aptamer to AFP
aaggggtgggggggagggcaaaaagttgttcg

SEQ ID NO: 236 - DNA, 32 bp, Artificial sequence
  Artificial aptamer to AFP,IGE,MMP9v
aaggggtgggggggagggcaaaaggttgttcg

SEQ ID NO: 237 - DNA, 32 bp, Artificial sequence
  Artificial aptamer to IGE
aagggtgggatagggtgggcaggagctggtga

SEQ ID NO: 238 - DNA, 32 bp, Artificial sequence
  Artificial aptamer to AFP
aagggtgggagggggggcaagggtttgtctcg

SEQ ID NO: 239 - DNA, 32 bp, Artificial sequence
  Artificial aptamer to IGE
aagggtgggtgggtgggggattaagcggaaca

SEQ ID NO: 240 - DNA, 32 bp, Artificial sequence
  Artificial aptamer to IGE
aaggtggatgggtgggtggtttatgacgctta

SEQ ID NO: 241 - DNA, 32 bp, Artificial sequence
  Artificial aptamer to MMP9v
aaggtagggggggcagggtgggcagagcttaa

SEQ ID NO: 242 - DNA, 32 bp, Artificial sequence
  Artificial aptamer to IGE
aaggtgagtgggtgggtggtttatgacgctta

SEQ ID NO: 243 - DNA, 32 bp, Artificial sequence
  Artificial aptamer to AFP
aaggtgggcgggagggtggataatagcgtata

SEQ ID NO: 244 - DNA, 32 bp, Artificial sequence
  Artificial aptamer to AFP
aaggtgggcgggagggtggatgatagcgtata

SEQ ID NO: 245 - DNA, 32 bp, Artificial sequence
  Artificial aptamer to IGE
aaggtgggggggtgggcggttttagaggggtg

SEQ ID NO: 246 - DNA, 32 bp, Artificial sequence
  Artificial aptamer to AFP
aaggtgggcgggcgggtggatggtatgcggta

SEQ ID NO: 247 - DNA, 32 bp, Artificial sequence
  Artificial aptamer to MMP9v
aaggtgggtgggagggtagttatgggcggaca

SEQ ID NO: 248 - DNA, 32 bp, Artificial sequence
  Artificial aptamer to MMP9v
aaggtgggtgggcggggggatttagctgaaca

SEQ ID NO: 249 - DNA, 32 bp, Artificial sequence
  Artificial aptamer to MMP9v
aaggtgggtgggagggtggttatgggcggaca

SEQ ID NO: 250 - DNA, 32 bp, Artificial sequence
  Artificial aptamer to IGE
aaggtgggtgggagggtggtttatgacgcttg

SEQ ID NO: 251 - DNA, 32 bp, Artificial sequence
  Artificial aptamer to AFP
aaggtgggtgggtggggggatttagcggaaca

SEQ ID NO: 252 - DNA, 32 bp, Artificial sequence
  Artificial aptamer to AFP
aaggtgggtgggtggggggattaagcggaaca

SEQ ID NO: 253 - DNA, 32 bp, Artificial sequence
  Artificial aptamer to MMP9v
aaggtgggtgggtggggggattaagcggcaca

SEQ ID NO: 254 - DNA, 32 bp, Artificial sequence
  Artificial aptamer to IGE
aaggtgggtgggtgggtggattatggcgctta

SEQ ID NO: 255 - DNA, 32 bp, Artificial sequence
  Artificial aptamer to IGE
aagtaaaagggggggagggagggcaagagcgg

SEQ ID NO: 256 - DNA, 32 bp, Artificial sequence
  Artificial aptamer to IGE
aagtaagggagggggggagggcaaatagcgaa

SEQ ID NO: 257 - DNA, 32 bp, Artificial sequence
  Artificial aptamer to IGE
aagtaatagggagggagggagggaaaaaagcg

SEQ ID NO: 258 - DNA, 32 bp, Artificial sequence
  Artificial aptamer to IGE
aagtaatagggagggagggagggaagaaagcg

SEQ ID NO: 259 - DNA, 32 bp, Artificial sequence
  Artificial aptamer to AFP,IGE
aagtggagggggggtgggtggtacaaagcggg

SEQ ID NO: 260 - DNA, 32 bp, Artificial sequence
  Artificial aptamer to AFP
aagtgggagggtgggtggtataagaagcggaa

SEQ ID NO: 261 - DNA, 32 bp, Artificial sequence
  Artificial aptamer to AFP
aagtgggagggtgggtggaaaggaagccgttt

SEQ ID NO: 262 - DNA, 32 bp, Artificial sequence
  Artificial aptamer to IGE
aagtgggagggtgggtggataggaagccgttt

SEQ ID NO: 263 - DNA, 32 bp, Artificial sequence
  Artificial aptamer to MMP9v
aagtgggggggagggtgggtaatagcgggaca

SEQ ID NO: 264 - DNA, 32 bp, Artificial sequence
  Artificial aptamer to AFP
aagtgggtgggcgggtggtataaatgtggcgt

SEQ ID NO: 265 - DNA, 32 bp, Artificial sequence
  Artificial aptamer to AFP
aagtgggtgggggggtggttaaaaggtggata

SEQ ID NO: 266 - DNA, 32 bp, Artificial sequence
  Artificial aptamer to IGE
aataaagggagggtgggtagggtatgcggata

SEQ ID NO: 267 - DNA, 32 bp, Artificial sequence
  Artificial aptamer to IGE
aataagggagggagggggggtacgtgcgtgaa

SEQ ID NO: 268 - DNA, 32 bp, Artificial sequence
  Artificial aptamer to IGE
aagtgggtgggttatgggtgggtttgaagtgc

SEQ ID NO: 269 - DNA, 32 bp, Artificial sequence
  Artificial aptamer to IGE
aataaagggagggagggagggcaagagcgtgg

SEQ ID NO: 270 - DNA, 32 bp, Artificial sequence
  Artificial aptamer to IGE
aataaagggagggagggcgggcaagagcgtgg

SEQ ID NO: 271 - DNA, 32 bp, Artificial sequence
  Artificial aptamer to IGE
aatacaagggagggagggagggcaaagagggt

SEQ ID NO: 272 - DNA, 32 bp, Artificial sequence
  Artificial aptamer to AFP
aatacggggagggtgggggggcttagcgtaaa

SEQ ID NO: 273 - DNA, 32 bp, Artificial sequence
  Artificial aptamer to MMP9v
aatacgggtgggagggggggataataggagtg

SEQ ID NO: 274 - DNA, 32 bp, Artificial sequence
  Artificial aptamer to IGE
aataggggagggggggtgggttacacgagcga

SEQ ID NO: 275 - DNA, 32 bp, Artificial sequence
  Artificial aptamer to AFP
aatagggagggagggggggacgaaagcgggga

SEQ ID NO: 276 - DNA, 32 bp, Artificial sequence
  Artificial aptamer to MMP9v
aatagggagggcgggagggcaagaggagttga

SEQ ID NO: 277 - DNA, 32 bp, Artificial sequence
  Artificial aptamer to IGE
aatagggagggggggagggcatagtggttcga

SEQ ID NO: 278 - DNA, 32 bp, Artificial sequence
  Artificial aptamer to AFP
acagtgggtgggtgggcggagtagaagagcgt

SEQ ID NO: 279 - DNA, 32 bp, Artificial sequence
  Artificial aptamer to IGE
acagtgggtgggtgggtggagtgtattaagcg

SEQ ID NO: 280 - DNA, 32 bp, Artificial sequence
  Artificial aptamer to AFP
accagtgggggggtgggaggaggttgcgcata

SEQ ID NO: 281 - DNA, 32 bp, Artificial sequence
  Artificial aptamer to AFP
aatgtgggagggtgggtggcaaaaaagcgtaa

SEQ ID NO: 282 - DNA, 32 bp, Artificial sequence
  Artificial aptamer to AFP
aatgtgggagggtgggtggtaaaaaagcgtaa

SEQ ID NO: 283 - DNA, 32 bp, Artificial sequence
  Artificial aptamer to AFP
aatgtgggagggtgggtggtaaaaaagtgtaa

SEQ ID NO: 284 - DNA, 32 bp, Artificial sequence
  Artificial aptamer to MMP9v
aatgtgggtgggagggtggatatgggcggaca

SEQ ID NO: 285 - DNA, 32 bp, Artificial sequence
  Artificial aptamer to MMP9v
aatgtgggtgggtgggtggatactagggttga

SEQ ID NO: 286 - DNA, 32 bp, Artificial sequence
  Artificial aptamer to AFP
aatgtgggtgggagggtggtaggtagagttta

SEQ ID NO: 287 - DNA, 32 bp, Artificial sequence
  Artificial aptamer to IGE
aattgaagggagggagggggggtatagagtgt

SEQ ID NO: 288 - DNA, 32 bp, Artificial sequence
  Artificial aptamer to IGE
aattggggagggcgggggggtatcaagagcgt

SEQ ID NO: 289 - DNA, 32 bp, Artificial sequence
  Artificial aptamer to AFP,MMP9v
aattggggagggtgggtcgggataggcgtgaa

SEQ ID NO: 290 - DNA, 32 bp, Artificial sequence
  Artificial aptamer to MMP9v
aattggggagggtgggtcgggataggcgtgta

SEQ ID NO: 291 - DNA, 32 bp, Artificial sequence
  Artificial aptamer to IGE
aattgggtggggggttgggattcgatcgttta

SEQ ID NO: 292 - DNA, 32 bp, Artificial sequence
  Artificial aptamer to IGE
acaagggagggagggtgggcatcagcgtaata

SEQ ID NO: 293 - DNA, 32 bp, Artificial sequence
  Artificial aptamer to IGE
acaagggagggtgggagggaatagatgcggtt

SEQ ID NO: 294 - DNA, 32 bp, Artificial sequence
  Artificial aptamer to MMP9v
acaagggagggtgggtagggataaatagcggt

SEQ ID NO: 295 - DNA, 32 bp, Artificial sequence
  Artificial aptamer to AFP
acacggcgggtgggagggtggagtgtccgcgt

SEQ ID NO: 296 - DNA, 32 bp, Artificial sequence
  Artificial aptamer to MMP9v
acacggcgggtgggggggtggagagtccgcgt

SEQ ID NO: 297 - DNA, 32 bp, Artificial sequence
  Artificial aptamer to AFP
acacggtgggtgggagggtggagtgtccgcgt

SEQ ID NO: 298 - DNA, 32 bp, Artificial sequence
  Artificial aptamer to AFP
acaggagggggggtgggtggagtgaagagggt

SEQ ID NO: 299 - DNA, 32 bp, Artificial sequence
  Artificial aptamer to IGE
acagggagggagggtgggtacaatgagcggaa

SEQ ID NO: 300 - DNA, 32 bp, Artificial sequence
  Artificial aptamer to IGE
acagggagggtgggggggtcatagagcgtact

SEQ ID NO: 301 - DNA, 32 bp, Artificial sequence
  Artificial aptamer to IGE
acagggagggagggggggataggaagcgtggg

SEQ ID NO: 302 - DNA, 32 bp, Artificial sequence
  Artificial aptamer to IGE
acagggagggagggggggcaaaacaagcgaaa

SEQ ID NO: 303 - DNA, 32 bp, Artificial sequence
  Artificial aptamer to AFP,IGE
acagggagggagggggggcaaaacaagcgaga

SEQ ID NO: 304 - DNA, 32 bp, Artificial sequence
  Artificial aptamer to IGE
acaggggagggagggtgggcatcagcgtaata

SEQ ID NO: 305 - DNA, 32 bp, Artificial sequence
  Artificial aptamer to AFP
acagtgggagggtgagcggagtagaagagcgt

SEQ ID NO: 306 - DNA, 32 bp, Artificial sequence
  Artificial aptamer to AFP
acagtgggagggtgggcggagtaaaagagcgt

SEQ ID NO: 307 - DNA, 32 bp, Artificial sequence
  Artificial aptamer to IGE,MMP9v
acagtgggagggtgggcggagtagaagagcgt

SEQ ID NO: 308 - DNA, 32 bp, Artificial sequence
  Artificial aptamer to AFP
acagtgggagggtgggcggagttgaagagcgt

SEQ ID NO: 309 - DNA, 32 bp, Artificial sequence
  Artificial aptamer to MMP9v
acagtgggagggtgggcggagttgaagggcgt

SEQ ID NO: 310 - DNA, 32 bp, Artificial sequence
  Artificial aptamer to IGE
acagtgggagggtgggcggagtaggagagcgg

SEQ ID NO: 311 - DNA, 32 bp, Artificial sequence
  Artificial aptamer to AFP
acagtgggagggtgggcggagtataagagcgt

SEQ ID NO: 312 - DNA, 32 bp, Artificial sequence
  Artificial aptamer to MMP9v
acagtgggagggtgggtggagtagaagggcgt

SEQ ID NO: 313 - DNA, 32 bp, Artificial sequence
  Artificial aptamer to MMP9v
acagtgggggggtgggtggaggtggtgttata

SEQ ID NO: 314 - DNA, 32 bp, Artificial sequence
  Artificial aptamer to IGE
acagtgggtgggggggtggagttatagcgagg

SEQ ID NO: 315 - DNA, 32 bp, Artificial sequence
  Artificial aptamer to AFP
acagtgggtgggggggaggagttatagcgtgg

SEQ ID NO: 316 - DNA, 32 bp, Artificial sequence
  Artificial aptamer to IGE
acagtgggtgggggggaggggttatagcgagg

SEQ ID NO: 317 - DNA, 32 bp, Artificial sequence
  Artificial aptamer to MMP9v
acgggttgggtgggggggtaaaaagcggaaaa

SEQ ID NO: 318 - DNA, 32 bp, Artificial sequence
  Artificial aptamer to AFP,MMP9v
acggtgagggcgggggggtggaagtagggcgt

SEQ ID NO: 319 - DNA, 32 bp, Artificial sequence
  Artificial aptamer to MMP9v
acggtgggagggtgggcggagcttgggctgga

SEQ ID NO: 320 - DNA, 32 bp, Artificial sequence
  Artificial aptamer to AFP,MMP9v
acggtgggggggtgggaggaggggagccatta

SEQ ID NO: 321 - DNA, 32 bp, Artificial sequence
  Artificial aptamer to MMP9v
acggtgggggggtgggaggagataagcgggta

SEQ ID NO: 322 - DNA, 32 bp, Artificial sequence
  Artificial aptamer to AFP
acggtggggggtgggtgggagtgataacgtga

SEQ ID NO: 323 - DNA, 32 bp, Artificial sequence
  Artificial aptamer to MMP9v
acggtgggggggtgggtggagtggcaacgtga

SEQ ID NO: 324 - DNA, 32 bp, Artificial sequence
  Artificial aptamer to AFP
acggtggggggtgggagggaggggagccatta

SEQ ID NO: 325 - DNA, 32 bp, Artificial sequence
  Artificial aptamer to AFP
acggtgggtgggggggaggagttatagcgagg

SEQ ID NO: 326 - DNA, 32 bp, Artificial sequence
  Artificial aptamer to AFP,MMP9v
acggtgggtgggtgggtggagcttgggctgga

SEQ ID NO: 327 - DNA, 32 bp, Artificial sequence
  Artificial aptamer to AFP
acggtgggtgggtggggggtgttcatacgtaa

SEQ ID NO: 328 - DNA, 32 bp, Artificial sequence
  Artificial aptamer to MMP9v
acggtgggtgggtgggtgaagcttgggctgga

SEQ ID NO: 329 - DNA, 32 bp, Artificial sequence
  Artificial aptamer to IGE
accggtgggggggagggaggaggttgcgcata

SEQ ID NO: 330 - DNA, 32 bp, Artificial sequence
  Artificial aptamer to MMP9v
accggtgggggggtgggaggaggttccgcata

SEQ ID NO: 331 - DNA, 32 bp, Artificial sequence
  Artificial aptamer to MMP9v
accggtgggggggtgggaggaggttgcacata

SEQ ID NO: 332 - DNA, 32 bp, Artificial sequence
  Artificial aptamer to MMP9v
accggtgggggggtgggacgaggttgggcata

SEQ ID NO: 333 - DNA, 32 bp, Artificial sequence
  Artificial aptamer to MMP9v
accggtgggggggtgggaggaggtagcgcata

SEQ ID NO: 334 - DNA, 32 bp, Artificial sequence
  Artificial aptamer to MMP9v
accggtgggggggtgggaggaggtagcgctta

SEQ ID NO: 335 - DNA, 32 bp, Artificial sequence
  Artificial aptamer to MMP9v
accggtgggggggtgggaggaggttgcccgta

SEQ ID NO: 336 - DNA, 32 bp, Artificial sequence
  Artificial aptamer to MMP9v
accggtgggggggtgggaggaggttgcgcaca

SEQ ID NO: 337 - DNA, 32 bp, Artificial sequence
  Artificial aptamer to MMP9v
accggtggggggtgggaggaggttgcggcata

SEQ ID NO: 338 - DNA, 32 bp, Artificial sequence
  Artificial aptamer to MMP9v
accggtggggggtgggaggaggttggcgcata

SEQ ID NO: 339 - DNA, 32 bp, Artificial sequence
  Artificial aptamer to AFP
accggtgggggggtgggtggaggttgcgcata

SEQ ID NO: 340 - DNA, 32 bp, Artificial sequence
  Artificial aptamer to IGE
accggtgggggggttggaggaggttgcgcata

SEQ ID NO: 341 - DNA, 32 bp, Artificial sequence
  Artificial aptamer to IGE
accggtgggggtgggagggaggttggcgcata

SEQ ID NO: 342 - DNA, 32 bp, Artificial sequence
  Artificial aptamer to MMP9v
accggtggggtggtgggaggaggttgcgcata

SEQ ID NO: 343 - DNA, 32 bp, Artificial sequence
  Artificial aptamer to MMP9v
accggtgggtgggtgggaggaggttgcgcata

SEQ ID NO: 344 - DNA, 32 bp, Artificial sequence
  Artificial aptamer to MMP9v
acctgtgggggggtgggaggaggttgcgcata

SEQ ID NO: 345 - DNA, 32 bp, Artificial sequence
  Artificial aptamer to MMP9v
acgagggggtgggtgggcggtagtaagcggga

SEQ ID NO: 346 - DNA, 32 bp, Artificial sequence
  Artificial aptamer to IGE
acgagggtgggtgggtggacaaaagagcggaa

SEQ ID NO: 347 - DNA, 32 bp, Artificial sequence
  Artificial aptamer to MMP9v
acgagggtgggtgggtggtcaaaagggcggaa

SEQ ID NO: 348 - DNA, 32 bp, Artificial sequence
  Artificial aptamer to AFP
acggagggagggtgggtggagatggacgtaaa

SEQ ID NO: 349 - DNA, 32 bp, Artificial sequence
  Artificial aptamer to AFP
acggggagggtgggggggtcaaaagcgtaaca

SEQ ID NO: 350 - DNA, 32 bp, Artificial sequence
  Artificial aptamer to MMP9v
acgggagggtgggtggaagagcgggtaggcgg

SEQ ID NO: 351 - DNA, 32 bp, Artificial sequence
  Artificial aptamer to MMP9v
acgggatgggggggtgggtagatagcgcggta

SEQ ID NO: 352 - DNA, 32 bp, Artificial sequence
  Artificial aptamer to AFP
acgggggtgggtgggtggaaaagaaacggata

SEQ ID NO: 353 - DNA, 32 bp, Artificial sequence
  Artificial aptamer to MMP9v
acgggggcgggcgggtggagagtgagggataa

SEQ ID NO: 354 - DNA, 32 bp, Artificial sequence
  Artificial aptamer to MMP9v
acgggtgggagggggggtataaagagcgacta

SEQ ID NO: 355 - DNA, 32 bp, Artificial sequence
  Artificial aptamer to IGE
acgggtgggggggagggcaattgagagtgcgg

SEQ ID NO: 356 - DNA, 32 bp, Artificial sequence
  Artificial aptamer to AFP
acgggtgggggggagggcacaaaagcggtgaa

SEQ ID NO: 357 - DNA, 32 bp, Artificial sequence
  Artificial aptamer to IGE
agagggtgggtgggaggaaaaataagcgtgta

SEQ ID NO: 358 - DNA, 32 bp, Artificial sequence
  Artificial aptamer to AFP
agagggtgggtgggtggaaaaataagcgtgaa

SEQ ID NO: 359 - DNA, 32 bp, Artificial sequence
  Artificial aptamer to AFP
agagggtgggtgggtggaaaaataagcgtgta

SEQ ID NO: 360 - DNA, 32 bp, Artificial sequence
  Artificial aptamer to IGE
agagtagggagggtgggggggctaagcgcgaa

SEQ ID NO: 361 - DNA, 32 bp, Artificial sequence
  Artificial aptamer to MMP9v
agagtgggagggagggggggtaatagcgctga

SEQ ID NO: 362 - DNA, 32 bp, Artificial sequence
  Artificial aptamer to AFP
agagtgggagggcgggtggaattttgacggta

SEQ ID NO: 363 - DNA, 32 bp, Artificial sequence
  Artificial aptamer to AFP
agagtgggcgggcgggtggaattttgacggta

SEQ ID NO: 364 - DNA, 32 bp, Artificial sequence
  Artificial aptamer to AFP
agagtgggtgggcgggtggaattctgacggta

SEQ ID NO: 365 - DNA, 32 bp, Artificial sequence
  Artificial aptamer to AFP
agagtgggtgggcgggcggaattttgacggta

SEQ ID NO: 366 - DNA, 32 bp, Artificial sequence
  Artificial aptamer to AFP
agagtgggtgggcgggtggaactttgacggta

SEQ ID NO: 367 - DNA, 32 bp, Artificial sequence
  Artificial aptamer to AFP
agagtgggtgggcgggtggtattttgacggta

SEQ ID NO: 368 - DNA, 32 bp, Artificial sequence
  Artificial aptamer to AFP
agagtgggtgggcgggtggaattttggcggta

SEQ ID NO: 369 - DNA, 32 bp, Artificial sequence
  Artificial aptamer to AFP
agagtgggtgggcgggtggagttttgacggta

SEQ ID NO: 370 - DNA, 32 bp, Artificial sequence
  Artificial aptamer to IGE
agatagggggggagggagggttagcgtatatc

SEQ ID NO: 371 - DNA, 32 bp, Artificial sequence
  Artificial aptamer to AFP
agagtgggtgggtgggtggaattttgacggta

SEQ ID NO: 372 - DNA, 32 bp, Artificial sequence
  Artificial aptamer to AFP
acgtgggagggtgggtggaaaagagatggtta

SEQ ID NO: 373 - DNA, 32 bp, Artificial sequence
  Artificial aptamer to AFP
acgtgggagggtgggtggaaaagagatgttta

SEQ ID NO: 374 - DNA, 32 bp, Artificial sequence
  Artificial aptamer to AFP
acgtgggagggtgggtggaaaagagacgatta

SEQ ID NO: 375 - DNA, 32 bp, Artificial sequence
  Artificial aptamer to IGE
acgtgggagggtgggtggaaaagagatgaata

SEQ ID NO: 376 - DNA, 32 bp, Artificial sequence
  Artificial aptamer to IGE
acgtgggagggtgggtggaaaagagatgagta

SEQ ID NO: 377 - DNA, 32 bp, Artificial sequence
  Artificial aptamer to AFP
acgtgggagggtgggtggaaaggagatgatta

SEQ ID NO: 378 - DNA, 32 bp, Artificial sequence
  Artificial aptamer to AFP
acgtgggagggtgggtggaaaagaggtgatta

SEQ ID NO: 379 - DNA, 32 bp, Artificial sequence
  Artificial aptamer to AFP
acgtgggagggtgggtggtaaagagatgatta

SEQ ID NO: 380 - DNA, 32 bp, Artificial sequence
  Artificial aptamer to MMP9v
acgtgggagggtgggtggtaaagggatgatta

SEQ ID NO: 381 - DNA, 32 bp, Artificial sequence
  Artificial aptamer to AFP
acgtgggagggtgggtgggaaagagacgatta

SEQ ID NO: 382 - DNA, 32 bp, Artificial sequence
  Artificial aptamer to AFP
acgtgggggggtgggtggaaaagagatgatta

SEQ ID NO: 383 - DNA, 32 bp, Artificial sequence
  Artificial aptamer to AFP
acgtgggtgggtgggtggaaaagagatgatta

SEQ ID NO: 384 - DNA, 32 bp, Artificial sequence
  Artificial aptamer to IGE
actagggagggagggtgggcaatgaagcagtg

SEQ ID NO: 385 - DNA, 32 bp, Artificial sequence
  Artificial aptamer to IGE
actagggagggagggtgggcaatgaagcggcg

SEQ ID NO: 386 - DNA, 32 bp, Artificial sequence
  Artificial aptamer to IGE
actagggagggagggtgggcaatgaagcgggg

SEQ ID NO: 387 - DNA, 32 bp, Artificial sequence
  Artificial aptamer to AFP,IGE,MMP9v
actagggagggagggtgggcaatgaagcggtg

SEQ ID NO: 388 - DNA, 32 bp, Artificial sequence
  Artificial aptamer to IGE
actatgggagggagggggggtaaaggagcgag

SEQ ID NO: 389 - DNA, 32 bp, Artificial sequence
  Artificial aptamer to AFP
actctgggggggtgggggggaataaagagcgt

SEQ ID NO: 390 - DNA, 32 bp, Artificial sequence
  Artificial aptamer to IGE
actggagggggggtgggtggtagacgagcgta

SEQ ID NO: 391 - DNA, 32 bp, Artificial sequence
  Artificial aptamer to AFP,IGE
agaaagggagggagggggggtaaaaagcgcga

SEQ ID NO: 392 - DNA, 32 bp, Artificial sequence
  Artificial aptamer to IGE
agaaagggagggagggggggtaaaaagcgcgg

SEQ ID NO: 393 - DNA, 32 bp, Artificial sequence
  Artificial aptamer to MMP9v
agaaaagggggggagggggggcaagatggtta

SEQ ID NO: 394 - DNA, 32 bp, Artificial sequence
  Artificial aptamer to IGE,MMP9v
agaacacaaatgggggggtgggtagggtagtg

SEQ ID NO: 395 - DNA, 32 bp, Artificial sequence
  Artificial aptamer to IGE
agaacagggagggagggtgggtaggtgcggaa

SEQ ID NO: 396 - DNA, 32 bp, Artificial sequence
  Artificial aptamer to IGE
agaaagggagggagggggggtaaaaagtgcga

SEQ ID NO: 397 - DNA, 32 bp, Artificial sequence
  Artificial aptamer to MMP9v
agaaagggggggagggggggtaaaaagcgcga

SEQ ID NO: 398 - DNA, 32 bp, Artificial sequence
  Artificial aptamer to MMP9v
agaagggatgggggggtgggcattaagcggta

SEQ ID NO: 399 - DNA, 32 bp, Artificial sequence
  Artificial aptamer to IGE
agaagggagggagggcgggtcagcggagcttg

SEQ ID NO: 400 - DNA, 32 bp, Artificial sequence
  Artificial aptamer to IGE
agaagtccgagggggcgggtgggtggtaggat

SEQ ID NO: 401 - DNA, 32 bp, Artificial sequence
  Artificial aptamer to IGE
agaaggggtgggagggggggcttagcgcgcga

SEQ ID NO: 402 - DNA, 32 bp, Artificial sequence
  Artificial aptamer to IGE
agaagggtggagagggtgggtaaaaagcgagt

SEQ ID NO: 403 - DNA, 32 bp, Artificial sequence
  Artificial aptamer to MMP9v
agaagggtggggagggggggcaaagtgtttaa

SEQ ID NO: 404 - DNA, 32 bp, Artificial sequence
  Artificial aptamer to AFP,MMP9v
agaagggtgggggggctgggctatagcggaaa

SEQ ID NO: 405 - DNA, 32 bp, Artificial sequence
  Artificial aptamer to MMP9v
agaagtgggtgggtagggagggaaaaagcgta

SEQ ID NO: 406 - DNA, 32 bp, Artificial sequence
  Artificial aptamer to AFP,MMP9v
agacagagggagggtgggtggagtcgcgaggg

SEQ ID NO: 407 - DNA, 32 bp, Artificial sequence
  Artificial aptamer to MMP9v
agacgacggtcgaggtgtgggtgggtgggggg

SEQ ID NO: 408 - DNA, 32 bp, Artificial sequence
  Artificial aptamer to IGE
agacggagggagggtgggtggagtcgcgagtg

SEQ ID NO: 409 - DNA, 32 bp, Artificial sequence
  Artificial aptamer to MMP9v
agacggagggagggtgggtggagtcgtgaggg

SEQ ID NO: 410 - DNA, 32 bp, Artificial sequence
  Artificial aptamer to AFP,MMP9v
agacggagggagggtgggtggtgtcgcgaggg

SEQ ID NO: 411 - DNA, 32 bp, Artificial sequence
  Artificial aptamer to MMP9v
agacggagggagggtgggtggagtcacgaggg

SEQ ID NO: 412 - DNA, 32 bp, Artificial sequence
  Artificial aptamer to MMP9v
agacggagggagggtgggtggagtcgcgaggg

SEQ ID NO: 413 - DNA, 32 bp, Artificial sequence
  Artificial aptamer to IGE
agacggagggagggtgggtggagtcgcgaggt

SEQ ID NO: 414 - DNA, 32 bp, Artificial sequence
  Artificial aptamer to MMP9v
agacggggggagggtgggtggagtcgcgaggg

SEQ ID NO: 415 - DNA, 32 bp, Artificial sequence
  Artificial aptamer to MMP9v
agacggtgggagggtgggtggagtcgcgaggg

SEQ ID NO: 416 - DNA, 32 bp, Artificial sequence
  Artificial aptamer to AFP
agactggagaaacggcgggagggggggtggag

SEQ ID NO: 417 - DNA, 32 bp, Artificial sequence
  Artificial aptamer to IGE
agagggagggtgggtggaaaaataagcgtgaa

SEQ ID NO: 418 - DNA, 32 bp, Artificial sequence
  Artificial aptamer to IGE
agggggagggagggtgggttaccagcgtgcaa

SEQ ID NO: 419 - DNA, 32 bp, Artificial sequence
  Artificial aptamer to AFP
agggggagggagggtgggttgccagcgtgcaa

SEQ ID NO: 420 - DNA, 32 bp, Artificial sequence
  Artificial aptamer to MMP9v
agggggggtaatatagggtggggaagcggcaa

SEQ ID NO: 421 - DNA, 32 bp, Artificial sequence
  Artificial aptamer to IGE
agggggggagggagggtcatataaaagcggaa

SEQ ID NO: 422 - DNA, 32 bp, Artificial sequence
  Artificial aptamer to MMP9v
agggggggagggcggacaaaagcgttgaatgg

SEQ ID NO: 423 - DNA, 32 bp, Artificial sequence
  Artificial aptamer to MMP9v
agggggggagggcgggcaaaagcgttgaatgg

SEQ ID NO: 424 - DNA, 32 bp, Artificial sequence
  Artificial aptamer to IGE
agggggggagggttgggttagtacgagcgcga

SEQ ID NO: 425 - DNA, 32 bp, Artificial sequence
  Artificial aptamer to MMP9v
aggggggtgggtgggtggtatgcatagcgcaa

SEQ ID NO: 426 - DNA, 32 bp, Artificial sequence
  Artificial aptamer to MMP9v
agggggtgggtgggtggactagtaacgtgcaa

SEQ ID NO: 427 - DNA, 32 bp, Artificial sequence
  Artificial aptamer to MMP9v
agggggtgggtgggtggatagcgtaaaatgct

SEQ ID NO: 428 - DNA, 32 bp, Artificial sequence
  Artificial aptamer to AFP
agggggtgggtgggtggtaaaagagctttcaa

SEQ ID NO: 429 - DNA, 32 bp, Artificial sequence
  Artificial aptamer to AFP
aggggtgggtgggtgggtgaaaagagcttcaa

SEQ ID NO: 430 - DNA, 32 bp, Artificial sequence
  Artificial aptamer to IGE
agggtggagtgggtgggtagagcgattacaag

SEQ ID NO: 431 - DNA, 32 bp, Artificial sequence
  Artificial aptamer to AFP
agggtggagtgggtgggtcagacgtttaatat

SEQ ID NO: 432 - DNA, 32 bp, Artificial sequence
  Artificial aptamer to MMP9v
agatggagggagggtgggtggagtcgcgaggg

SEQ ID NO: 433 - DNA, 32 bp, Artificial sequence
  Artificial aptamer to IGE
agatatagggagggagggggggatggcgttga

SEQ ID NO: 434 - DNA, 32 bp, Artificial sequence
  Artificial aptamer to IGE
agatttagggagggagggggggatggcgttga

SEQ ID NO: 435 - DNA, 32 bp, Artificial sequence
  Artificial aptamer to MMP9v
aggaaaagggatgggtgggggggtataagcgt

SEQ ID NO: 436 - DNA, 32 bp, Artificial sequence
  Artificial aptamer to IGE,MMP9v
aggaatagggagggagggggggtacagcggca

SEQ ID NO: 437 - DNA, 32 bp, Artificial sequence
  Artificial aptamer to AFP
aggagggagggtgggtggataggtgcagtaaa

SEQ ID NO: 438 - DNA, 32 bp, Artificial sequence
  Artificial aptamer to IGE
aggagggagggtgggtggataggtgcagtaag

SEQ ID NO: 439 - DNA, 32 bp, Artificial sequence
  Artificial aptamer to AFP
aggagggagggtgggtggatttagcggattta

SEQ ID NO: 440 - DNA, 32 bp, Artificial sequence
  Artificial aptamer to AFP
aggagggagggtgggtggattgggcgtgctaa

SEQ ID NO: 441 - DNA, 32 bp, Artificial sequence
  Artificial aptamer to AFP
aggagggagggtgggtggatttagtggattta

SEQ ID NO: 442 - DNA, 32 bp, Artificial sequence
  Artificial aptamer to MMP9v
aggagggagggtgggtggatttagtgggttta

SEQ ID NO: 443 - DNA, 32 bp, Artificial sequence
  Artificial aptamer to MMP9v
aggagggatgggggggtgggcttaaagcggtg

SEQ ID NO: 444 - DNA, 32 bp, Artificial sequence
  Artificial aptamer to AFP
aggagggcgggcgggtggatgagcgtataaca

SEQ ID NO: 445 - DNA, 32 bp, Artificial sequence
  Artificial aptamer to AFP
aggagggtgggtgggtggatttagtggattta

SEQ ID NO: 446 - DNA, 32 bp, Artificial sequence
  Artificial aptamer to AFP
aggagggtgggtgggtggaataaagagagtta

SEQ ID NO: 447 - DNA, 32 bp, Artificial sequence
  Artificial aptamer to MMP9v
aggagggtgggtgggtggagtagggcagtgga

SEQ ID NO: 448 - DNA, 32 bp, Artificial sequence
  Artificial aptamer to MMP9v
aggagggtgggtgggtggagttgggcagtgga

SEQ ID NO: 449 - DNA, 32 bp, Artificial sequence
  Artificial aptamer to AFP
aggctcatgtaacggagggagggtgggtggag

SEQ ID NO: 450 - DNA, 32 bp, Artificial sequence
  Artificial aptamer to MMP9v
agggaaggagggtgggtaaggcgggtaatgat

SEQ ID NO: 451 - DNA, 32 bp, Artificial sequence
  Artificial aptamer to IGE
agggagggagggtgggtcaggaagcagttata

SEQ ID NO: 452 - DNA, 32 bp, Artificial sequence
  Artificial aptamer to IGE
agggagggagggtgggtggattagtggattta

SEQ ID NO: 453 - DNA, 32 bp, Artificial sequence
  Artificial aptamer to MMP9v
agggagggagggggggcaagaaatagcggcaa

SEQ ID NO: 454 - DNA, 32 bp, Artificial sequence
  Artificial aptamer to IGE
agggagggagggggggcaagaaatagcggcta

SEQ ID NO: 455 - DNA, 32 bp, Artificial sequence
  Artificial aptamer to IGE
agggagggagggggggcaagaaatagcggtaa

SEQ ID NO: 456 - DNA, 32 bp, Artificial sequence
  Artificial aptamer to IGE
agggagggagggggggtaatagagagcgaggt

SEQ ID NO: 457 - DNA, 32 bp, Artificial sequence
  Artificial aptamer to MMP9v
agggagggagggttggggagggattatgcgcg

SEQ ID NO: 458 - DNA, 32 bp, Artificial sequence
  Artificial aptamer to IGE
agggagggggggtgggtattaaggcggtcagg

SEQ ID NO: 459 - DNA, 32 bp, Artificial sequence
  Artificial aptamer to AFP
aggggagcacctgtcttgggtgggagggaggg

SEQ ID NO: 460 - DNA, 32 bp, Artificial sequence
  Artificial aptamer to IGE
aggggagggagggggggtaggaacagcgtaga

SEQ ID NO: 461 - DNA, 32 bp, Artificial sequence
  Artificial aptamer to IGE
aggggatgggagggtgggctgagcgtgcacaa

SEQ ID NO: 462 - DNA, 32 bp, Artificial sequence
  Artificial aptamer to MMP9v
agtgggggggtgggtggatagggcgttacatg

SEQ ID NO: 463 - DNA, 32 bp, Artificial sequence
  Artificial aptamer to AFP
agtgggggggtgggtggtaaagcaagcggaca

SEQ ID NO: 464 - DNA, 32 bp, Artificial sequence
  Artificial aptamer to AFP
agtgggcgggtgggtggtattgagcggaataa

SEQ ID NO: 465 - DNA, 32 bp, Artificial sequence
  Artificial aptamer to AFP
agtggggggggtgggtagggttacagcgtgta

SEQ ID NO: 466 - DNA, 32 bp, Artificial sequence
  Artificial aptamer to IGE
agtgggtgggagggtggaaggtagcggcgttc

SEQ ID NO: 467 - DNA, 32 bp, Artificial sequence
  Artificial aptamer to IGE
agtgggtgggagggtggaaggtagcggtattc

SEQ ID NO: 468 - DNA, 32 bp, Artificial sequence
  Artificial aptamer to MMP9v
agtgggtgggggggtggagatagagggatttg

SEQ ID NO: 469 - DNA, 32 bp, Artificial sequence
  Artificial aptamer to AFP
agtgggtgggcgggtggtcagtgataagttta

SEQ ID NO: 470 - DNA, 32 bp, Artificial sequence
  Artificial aptamer to MMP9v
agtgggtgggcgggtggtcagtgttaagttta

SEQ ID NO: 471 - DNA, 32 bp, Artificial sequence
  Artificial aptamer to AFP
agtgggtgggtgggtggaaaaggagagttgaa

SEQ ID NO: 472 - DNA, 32 bp, Artificial sequence
  Artificial aptamer to AFP
agtgggtgggtgggtggtaatgagcgcaagtg

SEQ ID NO: 473 - DNA, 32 bp, Artificial sequence
  Artificial aptamer to AFP
agtgggtgggtgggtggtatagctttaggatg

SEQ ID NO: 474 - DNA, 32 bp, Artificial sequence
  Artificial aptamer to IGE
agtgggttgggtgggtggtaaatagagcggtg

SEQ ID NO: 475 - DNA, 32 bp, Artificial sequence
  Artificial aptamer to MMP9v
agtgggttgggtgggtggtaaatagggcgagg

SEQ ID NO: 476 - DNA, 32 bp, Artificial sequence
  Artificial aptamer to IGE
aggtcgaaataggtgggcgggagggaggagat

SEQ ID NO: 477 - DNA, 32 bp, Artificial sequence
  Artificial aptamer to IGE
aggtgagggagggggggagggtaaaagcggtt

SEQ ID NO: 478 - DNA, 32 bp, Artificial sequence
  Artificial aptamer to AFP
aggtcgaaatcggtgggcgggtgggaggagat

SEQ ID NO: 479 - DNA, 32 bp, Artificial sequence
  Artificial aptamer to IGE
aggtggccagagggtatacccccgaaaagagg

SEQ ID NO: 480 - DNA, 32 bp, Artificial sequence
  Artificial aptamer to MMP9v
aggtgggaggatgggtggtataagaagcggaa

SEQ ID NO: 481 - DNA, 32 bp, Artificial sequence
  Artificial aptamer to AFP
aggtgggagggagggtggatgcgtggcggtga

SEQ ID NO: 482 - DNA, 32 bp, Artificial sequence
  Artificial aptamer to AFP
aggtgggagggtgggtggatagagcagttaca

SEQ ID NO: 483 - DNA, 32 bp, Artificial sequence
  Artificial aptamer to AFP
aggtgggagggtgggtggatagagcagttata

SEQ ID NO: 484 - DNA, 32 bp, Artificial sequence
  Artificial aptamer to AFP
aggtgggagggtgggtggatagagcagttatg

SEQ ID NO: 485 - DNA, 32 bp, Artificial sequence
  Artificial aptamer to AFP
aggtgggagggtgggtggatagagcagttgta

SEQ ID NO: 486 - DNA, 32 bp, Artificial sequence
  Artificial aptamer to AFP
aggtgggagggtgggtggatagagcggttatg

SEQ ID NO: 487 - DNA, 32 bp, Artificial sequence
  Artificial aptamer to AFP
aggtgggagggtgggtggatttagtggattta

SEQ ID NO: 488 - DNA, 32 bp, Artificial sequence
  Artificial aptamer to AFP
aggtgggagggtgggtggtataagatgcggaa

SEQ ID NO: 489 - DNA, 32 bp, Artificial sequence
  Artificial aptamer to AFP
aggtgggagggtgggtggtataaggagcggaa

SEQ ID NO: 490 - DNA, 32 bp, Artificial sequence
  Artificial aptamer to AFP
aggtgggagggtgggtggtataggaagcggaa

SEQ ID NO: 491 - DNA, 32 bp, Artificial sequence
  Artificial aptamer to AFP
aggtgggagggtgggtggtatatgaagcggaa

SEQ ID NO: 492 - DNA, 32 bp, Artificial sequence
  Artificial aptamer to IGE
aggtgggcgggtgggtgggataaggacggtta

SEQ ID NO: 493 - DNA, 32 bp, Artificial sequence
  Artificial aptamer to AFP
aggtgggcgggtgggtggataagagacggtta

SEQ ID NO: 494 - DNA, 32 bp, Artificial sequence
  Artificial aptamer to MMP9v
aggtgggcgggtgggtggataagggacggtta

SEQ ID NO: 495 - DNA, 32 bp, Artificial sequence
  Artificial aptamer to AFP
aggtggggggagggtggatgaaaagcgtcttg

SEQ ID NO: 496 - DNA, 32 bp, Artificial sequence
  Artificial aptamer to IGE
aggtgggtgggagggtggagtagaaggcgtta

SEQ ID NO: 497 - DNA, 32 bp, Artificial sequence
  Artificial aptamer to IGE
aggtgggtgggggggtggttaggagcgaagta

SEQ ID NO: 498 - DNA, 32 bp, Artificial sequence
  Artificial aptamer to AFP
aggtgggtgggggggtggatgaaagcggaaag

SEQ ID NO: 499 - DNA, 32 bp, Artificial sequence
  Artificial aptamer to AFP
aggtgggtgggtgggcggttaacaagcgtaaa

SEQ ID NO: 500 - DNA, 32 bp, Artificial sequence
  Artificial aptamer to AFP
aggtgggtgggtgggtggaaaagtgcgtcaaa

SEQ ID NO: 501 - DNA, 32 bp, Artificial sequence
  Artificial aptamer to IGE
aggtgggtgggtgggtggttaacaagcgtaga

SEQ ID NO: 502 - DNA, 32 bp, Artificial sequence
  Artificial aptamer to IGE
aggttttgggagggagggggggacagggttta

SEQ ID NO: 503 - DNA, 32 bp, Artificial sequence
  Artificial aptamer to IGE
agtaagggagggagggggggtaaaaagcgcga

SEQ ID NO: 504 - DNA, 32 bp, Artificial sequence
  Artificial aptamer to IGE
agtagggagggaggggtgggtcggagcgataa

SEQ ID NO: 505 - DNA, 32 bp, Artificial sequence
  Artificial aptamer to MMP9v
agtagggagggagggttgggtgaaagagtttg

SEQ ID NO: 506 - DNA, 32 bp, Artificial sequence
  Artificial aptamer to IGE,MMP9v
agtattacgggagggagggggggcaaaagcgt

SEQ ID NO: 507 - DNA, 32 bp, Artificial sequence
  Artificial aptamer to IGE
agtatagggagggagggtgggcattaaagcgg

SEQ ID NO: 508 - DNA, 32 bp, Artificial sequence
  Artificial aptamer to AFP
agtgacggaaggagaggagggtgggtgggtgg

SEQ ID NO: 509 - DNA, 32 bp, Artificial sequence
  Artificial aptamer to MMP9v
agtgacggagggagaggagggtgggtgggtgg

SEQ ID NO: 510 - DNA, 32 bp, Artificial sequence
  Artificial aptamer to MMP9v
agtgagggtgggggggtcgggctagcgattta

SEQ ID NO: 511 - DNA, 32 bp, Artificial sequence
  Artificial aptamer to IGE
agtgggagggagggtgggtccgcgtttagtcg

SEQ ID NO: 512 - DNA, 32 bp, Artificial sequence
  Artificial aptamer to IGE
agtgggagggtgggtggtaggcaagcgtagaa

SEQ ID NO: 513 - DNA, 32 bp, Artificial sequence
  Artificial aptamer to AFP
atcgtgggggggagggtggaaaaagagtgata

SEQ ID NO: 514 - DNA, 32 bp, Artificial sequence
  Artificial aptamer to AFP
atcggtgggggggtggggggagatggtgtgaa

SEQ ID NO: 515 - DNA, 32 bp, Artificial sequence
  Artificial aptamer to IGE
atctagggagggcgggggggcaatttcgtttg

SEQ ID NO: 516 - DNA, 32 bp, Artificial sequence
  Artificial aptamer to IGE
atctagggggggagggagggtaaatgcgattg

SEQ ID NO: 517 - DNA, 32 bp, Artificial sequence
  Artificial aptamer to MMP9v
atctgggtcggggtgggtgggcatagcgtatg

SEQ ID NO: 518 - DNA, 32 bp, Artificial sequence
  Artificial aptamer to AFP
atgagggtgggtgggtggtaagaggagctaaa

SEQ ID NO: 519 - DNA, 32 bp, Artificial sequence
  Artificial aptamer to IGE,MMP9v
atgagggggggagggagggttaaaggcgatta

SEQ ID NO: 520 - DNA, 32 bp, Artificial sequence
  Artificial aptamer to IGE
agttatgggtggagagggtgggtatgcggtaa

SEQ ID NO: 521 - DNA, 32 bp, Artificial sequence
  Artificial aptamer to AFP
agttgaaattaggagggtgggggggtggaaat

SEQ ID NO: 522 - DNA, 32 bp, Artificial sequence
  Artificial aptamer to IGE
ataaagggggggagggagggcaagagtgcgta

SEQ ID NO: 523 - DNA, 32 bp, Artificial sequence
  Artificial aptamer to IGE
agttttggggagggagggagggaaagcgtgaa

SEQ ID NO: 524 - DNA, 32 bp, Artificial sequence
  Artificial aptamer to AFP,IGE
ataagggagggagggtgggcaacaaggcgtta

SEQ ID NO: 525 - DNA, 32 bp, Artificial sequence
  Artificial aptamer to IGE
ataagggagggagggtgggcaacgaggcgtta

SEQ ID NO: 526 - DNA, 32 bp, Artificial sequence
  Artificial aptamer to IGE
ataagggagggagggtgggcagcaaggcgtta

SEQ ID NO: 527 - DNA, 32 bp, Artificial sequence
  Artificial aptamer to AFP,MMP9v
ataagggaggggagggtgggcaaggcggctta

SEQ ID NO: 528 - DNA, 32 bp, Artificial sequence
  Artificial aptamer to IGE
ataagggaggggagggtgggcaaggcggttta

SEQ ID NO: 529 - DNA, 32 bp, Artificial sequence
  Artificial aptamer to IGE,MMP9v
ataaggggagggagggggggttaagaatagcg

SEQ ID NO: 530 - DNA, 32 bp, Artificial sequence
  Artificial aptamer to IGE
ataagggggggagggagggcaataagcgtatt

SEQ ID NO: 531 - DNA, 32 bp, Artificial sequence
  Artificial aptamer to AFP,IGE,MMP9v
ataagggggggagggagggcagtaagcgtatt

SEQ ID NO: 532 - DNA, 32 bp, Artificial sequence
  Artificial aptamer to IGE
ataagggggggagggagggcagtaagcgtgtt

SEQ ID NO: 533 - DNA, 32 bp, Artificial sequence
  Artificial aptamer to MMP9v
ataagggttgggggggagggtaggtgtgttta

SEQ ID NO: 534 - DNA, 32 bp, Artificial sequence
  Artificial aptamer to IGE
atacaagggagggggggagggcatgcaggtta

SEQ ID NO: 535 - DNA, 32 bp, Artificial sequence
  Artificial aptamer to IGE
atagaaagggagggggggagggcaagcgttaa

SEQ ID NO: 536 - DNA, 32 bp, Artificial sequence
  Artificial aptamer to IGE
atagagggtgggagggagggcaaagagcgcat

SEQ ID NO: 537 - DNA, 32 bp, Artificial sequence
  Artificial aptamer to IGE
atagggagggagggttggggttaggggcggta

SEQ ID NO: 538 - DNA, 32 bp, Artificial sequence
  Artificial aptamer to AFP
ataggagggggggtgggtggatagggcgtttg

SEQ ID NO: 539 - DNA, 32 bp, Artificial sequence
  Artificial aptamer to MMP9v
ataggagggtgggtgggtggatatatgaacga

SEQ ID NO: 540 - DNA, 32 bp, Artificial sequence
  Artificial aptamer to AFP,MMP9v
atagggtgggagggatgggtaatagcgtgaca

SEQ ID NO: 541 - DNA, 32 bp, Artificial sequence
  Artificial aptamer to IGE
atagggggtgggtgggtggtaacgaagcgtct

SEQ ID NO: 542 - DNA, 32 bp, Artificial sequence
  Artificial aptamer to IGE
ataggggtgggatgggagggataacgcggaga

SEQ ID NO: 543 - DNA, 32 bp, Artificial sequence
  Artificial aptamer to IGE
atagggtagggggggagggcaaggcgttgtaa

SEQ ID NO: 544 - DNA, 32 bp, Artificial sequence
  Artificial aptamer to MMP9v
atagggtgggtagggggggtacagtttaaggt

SEQ ID NO: 545 - DNA, 32 bp, Artificial sequence
  Artificial aptamer to IGE
atagggtgggagggggggcacagcgttggaca

SEQ ID NO: 546 - DNA, 32 bp, Artificial sequence
  Artificial aptamer to AFP
atagtgggcgggtgggtggatagagtgtgtga

SEQ ID NO: 547 - DNA, 32 bp, Artificial sequence
  Artificial aptamer to AFP
atagtgggtgggcgggtggaattttgacggta

SEQ ID NO: 548 - DNA, 32 bp, Artificial sequence
  Artificial aptamer to AFP
atagtgggggggagggtggaatggagtgtata

SEQ ID NO: 549 - DNA, 32 bp, Artificial sequence
  Artificial aptamer to IGE
atagtgggggggagggtggaatggagtgtatg

SEQ ID NO: 550 - DNA, 32 bp, Artificial sequence
  Artificial aptamer to MMP9v
atagtgggtgggtgggtggaaagagtgtgtga

SEQ ID NO: 551 - DNA, 32 bp, Artificial sequence
  Artificial aptamer to IGE
atatcgggagggggggagggtaaaagcaagcg

SEQ ID NO: 552 - DNA, 32 bp, Artificial sequence
  Artificial aptamer to MMP9v
atatcgggggggtcgggtgggtcataagcggt

SEQ ID NO: 553 - DNA, 32 bp, Artificial sequence
  Artificial aptamer to IGE
atatcgggagggagggagggccatagcggaga

SEQ ID NO: 554 - DNA, 32 bp, Artificial sequence
  Artificial aptamer to MMP9v
atatgggggggtgggaagggtaggcgttacga

SEQ ID NO: 555 - DNA, 32 bp, Artificial sequence
  Artificial aptamer to MMP9v
atatgggagggggggcgggattgagtagttga

SEQ ID NO: 556 - DNA, 32 bp, Artificial sequence
  Artificial aptamer to IGE
atattgggttgggggggagggatagcgttcga

SEQ ID NO: 557 - DNA, 32 bp, Artificial sequence
  Artificial aptamer to IGE
atcaagggggggagggagggtaaatgcgattg

SEQ ID NO: 558 - DNA, 32 bp, Artificial sequence
  Artificial aptamer to MMP9v
atcagggggggtgggtagggtacatacgttaa

SEQ ID NO: 559 - DNA, 32 bp, Artificial sequence
  Artificial aptamer to IGE
attaagggagggtcgggcgggtaggagcgcaa

SEQ ID NO: 560 - DNA, 32 bp, Artificial sequence
  Artificial aptamer to IGE
attaaggggagggagggggggataatggtttg

SEQ ID NO: 561 - DNA, 32 bp, Artificial sequence
  Artificial aptamer to IGE
attcaagggagggggggagggcatgcaggtta

SEQ ID NO: 562 - DNA, 32 bp, Artificial sequence
  Artificial aptamer to MMP9v
attagggtgggagggggggcagagcggttgaa

SEQ ID NO: 563 - DNA, 32 bp, Artificial sequence
  Artificial aptamer to MMP9v
attagggtgggagggggggcggagcggttgaa

SEQ ID NO: 564 - DNA, 32 bp, Artificial sequence
  Artificial aptamer to IGE,MMP9v
attatagggggggagggagggtaaggcgtaga

SEQ ID NO: 565 - DNA, 32 bp, Artificial sequence
  Artificial aptamer to MMP9v
attatgggggggagggatgggaaaaagcgtgg

SEQ ID NO: 566 - DNA, 32 bp, Artificial sequence
  Artificial aptamer to IGE
attatgggtgggacgggggggtcagcggggaa

SEQ ID NO: 567 - DNA, 32 bp, Artificial sequence
  Artificial aptamer to IGE
attcgggatgggtgggagggtaaagcgttgaa

SEQ ID NO: 568 - DNA, 32 bp, Artificial sequence
  Artificial aptamer to MMP9v
attggagggggggtgggtggaaattagctgca

SEQ ID NO: 569 - DNA, 32 bp, Artificial sequence
  Artificial aptamer to MMP9v
attgggggggttcgggtgggtaaggtagcgtg

SEQ ID NO: 570 - DNA, 32 bp, Artificial sequence
  Artificial aptamer to IGE
attgggagggagggggggttgagctgtgatgg

SEQ ID NO: 571 - DNA, 32 bp, Artificial sequence
  Artificial aptamer to MMP9v
attgggatgggggggtgggtagagcgacaata

SEQ ID NO: 572 - DNA, 32 bp, Artificial sequence
  Artificial aptamer to MMP9v
attgggtgggaaggggggtatgggcttttatg

SEQ ID NO: 573 - DNA, 32 bp, Artificial sequence
  Artificial aptamer to AFP
attggtgggggggtgggtggaaagcagatcga

SEQ ID NO: 574 - DNA, 32 bp, Artificial sequence
  Artificial aptamer to AFP
attgtgggttgggtggggggtaataagcgtgg

SEQ ID NO: 575 - DNA, 32 bp, Artificial sequence
  Artificial aptamer to IGE
attgtgggttgggtggggggtattaagcgtgg

SEQ ID NO: 576 - DNA, 32 bp, Artificial sequence
  Artificial aptamer to AFP
attgtgggtgggggggtggaagagctaattcg

SEQ ID NO: 577 - DNA, 32 bp, Artificial sequence
  Artificial aptamer to AFP,MMP9v
atgatgggagggtgggtagggaaaagcgggga

SEQ ID NO: 578 - DNA, 32 bp, Artificial sequence
  Artificial aptamer to AFP
atggagaaggtagcgggagggtgggtggaaac

SEQ ID NO: 579 - DNA, 32 bp, Artificial sequence
  Artificial aptamer to IGE
atggaggcgggcggggggaagaggtagcgtgt

SEQ ID NO: 580 - DNA, 32 bp, Artificial sequence
  Artificial aptamer to IGE
atggagggtgggagggtggaagtatagcgtgg

SEQ ID NO: 581 - DNA, 32 bp, Artificial sequence
  Artificial aptamer to IGE
atggagggtgggagggtggaagtatggcgtga

SEQ ID NO: 582 - DNA, 32 bp, Artificial sequence
  Artificial aptamer to AFP
atggagggtgggtgggtggaagtatagcgtga

SEQ ID NO: 583 - DNA, 32 bp, Artificial sequence
  Artificial aptamer to AFP
atggagggtgggtgggtggaagttagcagtaa

SEQ ID NO: 584 - DNA, 32 bp, Artificial sequence
  Artificial aptamer to AFP
atggagggtgggggggtggaagtatagcgtga

SEQ ID NO: 585 - DNA, 32 bp, Artificial sequence
  Artificial aptamer to AFP,MMP9v
atggagggtgggtgggtggtgatttgggcagg

SEQ ID NO: 586 - DNA, 32 bp, Artificial sequence
  Artificial aptamer to MMP9v
atgggatgggttgggtgggaatatagcgaaaa

SEQ ID NO: 587 - DNA, 32 bp, Artificial sequence
  Artificial aptamer to MMP9v
atggggagggatgggtgggttcgaagcggata

SEQ ID NO: 588 - DNA, 32 bp, Artificial sequence
  Artificial aptamer to AFP,IGE
atggggggagggtgggtggaatgcaagcgggc

SEQ ID NO: 589 - DNA, 32 bp, Artificial sequence
  Artificial aptamer to AFP
atggggggagggtgggtggtatgcaagcgggc

SEQ ID NO: 590 - DNA, 32 bp, Artificial sequence
  Artificial aptamer to AFP
atggggggtgggagggtggaagtatagcgtga

SEQ ID NO: 591 - DNA, 32 bp, Artificial sequence
  Artificial aptamer to MMP9v
atggggggtgggggggtggaaagcgagcaaaa

SEQ ID NO: 592 - DNA, 32 bp, Artificial sequence
  Artificial aptamer to MMP9v
atgggtagggtgggagggtatattaacgctta

SEQ ID NO: 593 - DNA, 32 bp, Artificial sequence
  Artificial aptamer to IGE
atgggtgggagggagggttaaaaggcggtgga

SEQ ID NO: 594 - DNA, 32 bp, Artificial sequence
  Artificial aptamer to IGE
atgggtgggtggggaaaaggtcaggtggcatc

SEQ ID NO: 595 - DNA, 32 bp, Artificial sequence
  Artificial aptamer to AFP
atgggtgtggtgggtggggaagcggatatgat

SEQ ID NO: 596 - DNA, 32 bp, Artificial sequence
  Artificial aptamer to IGE
atgtgggagggtgggggggttatcagcgttca

SEQ ID NO: 597 - DNA, 32 bp, Artificial sequence
  Artificial aptamer to AFP
atgtgggagggtgggtggaaaagagatgatta

SEQ ID NO: 598 - DNA, 32 bp, Artificial sequence
  Artificial aptamer to MMP9v
atgtgggcgggagggtggaatagagcgggtag

SEQ ID NO: 599 - DNA, 32 bp, Artificial sequence
  Artificial aptamer to MMP9v
atgtgggtgggagggtggaattgagcgggtag

SEQ ID NO: 600 - DNA, 32 bp, Artificial sequence
  Artificial aptamer to MMP9v
atgtgggtgggagggtggaatagagcgggtag

SEQ ID NO: 601 - DNA, 32 bp, Artificial sequence
  Artificial aptamer to MMP9v
atgtgggtgggagggtggtatagagcgggcag

SEQ ID NO: 602 - DNA, 32 bp, Artificial sequence
  Artificial aptamer to AFP
atgtgggtgggagggtggtatagagcgggtag

SEQ ID NO: 603 - DNA, 32 bp, Artificial sequence
  Artificial aptamer to MMP9v
caagggttgggtgggagggcatgcagcgtgga

SEQ ID NO: 604 - DNA, 32 bp, Artificial sequence
  Artificial aptamer to AFP,MMP9v
caagtgggagggtgggtggtagggggaagtgg

SEQ ID NO: 605 - DNA, 32 bp, Artificial sequence
  Artificial aptamer to AFP
attgtgggttgggtgggtggtaataagcgtgg

SEQ ID NO: 606 - DNA, 32 bp, Artificial sequence
  Artificial aptamer to AFP,MMP9v
atttcgggggggcgggtagggttaaagcgtta

SEQ ID NO: 607 - DNA, 32 bp, Artificial sequence
  Artificial aptamer to IGE
atttgggatgggtgggagggtatagcgttgaa

SEQ ID NO: 608 - DNA, 32 bp, Artificial sequence
  Artificial aptamer to AFP
atttgggagggggggggggtacaagcgtctgc

SEQ ID NO: 609 - DNA, 32 bp, Artificial sequence
  Artificial aptamer to AFP,MMP9v
atttgggatgggtgggagggtaaagcgttgaa

SEQ ID NO: 610 - DNA, 32 bp, Artificial sequence
  Artificial aptamer to IGE
caaaaagggggggagggagggaaaagagcggg

SEQ ID NO: 611 - DNA, 32 bp, Artificial sequence
  Artificial aptamer to MMP9v
caaaagggtgggcagggagggataagaagcgt

SEQ ID NO: 612 - DNA, 32 bp, Artificial sequence
  Artificial aptamer to IGE
caaagggagggagggtgggcaaaagcggctca

SEQ ID NO: 613 - DNA, 32 bp, Artificial sequence
  Artificial aptamer to IGE,MMP9v
caaagagggtgggagggagggcttgcgtttaa

SEQ ID NO: 614 - DNA, 32 bp, Artificial sequence
  Artificial aptamer to AFP,IGE,MMP9v
caaagggagggagggggggtaaaaatgcggaa

SEQ ID NO: 615 - DNA, 32 bp, Artificial sequence
  Artificial aptamer to IGE
caaaggggggggagggagggtaacagcgtcga

SEQ ID NO: 616 - DNA, 32 bp, Artificial sequence
  Artificial aptamer to IGE
caagggagggagggggggaaataacaagcgaa

SEQ ID NO: 617 - DNA, 32 bp, Artificial sequence
  Artificial aptamer to AFP
caagggtgggggggagggcatatcgcgttata

SEQ ID NO: 618 - DNA, 32 bp, Artificial sequence
  Artificial aptamer to AFP
caagggtgggggggagggcatatcgcgttatg

SEQ ID NO: 619 - DNA, 32 bp, Artificial sequence
  Artificial aptamer to IGE
caagggggggagggtgggcatatgcgttccaa

SEQ ID NO: 620 - DNA, 32 bp, Artificial sequence
  Artificial aptamer to MMP9v
caagggggggggtgggtggagttggaagtaaa

SEQ ID NO: 621 - DNA, 32 bp, Artificial sequence
  Artificial aptamer to MMP9v
caaggggtgagagggagggatgttacgggcgt

SEQ ID NO: 622 - DNA, 32 bp, Artificial sequence
  Artificial aptamer to MMP9v
cagagggtgggggggtggaggcagagaagtgt

SEQ ID NO: 623 - DNA, 32 bp, Artificial sequence
  Artificial aptamer to MMP9v
cagagggtgggggggtggaggcagaggagtgt

SEQ ID NO: 624 - DNA, 32 bp, Artificial sequence
  Artificial aptamer to MMP9v
cagagggtgggggggtggaggcggagaagtgt

SEQ ID NO: 625 - DNA, 32 bp, Artificial sequence
  Artificial aptamer to IGE
cactaagggaggtgggtgggaatagatagcgg

SEQ ID NO: 626 - DNA, 32 bp, Artificial sequence
  Artificial aptamer to AFP
caggggggtgggagggtggatggtagcagtgg

SEQ ID NO: 627 - DNA, 32 bp, Artificial sequence
  Artificial aptamer to MMP9v
caggggggtgggagggtggacggtagcggtgg

SEQ ID NO: 628 - DNA, 32 bp, Artificial sequence
  Artificial aptamer to MMP9v
caggggggtgggagggtggatgatggcggtgg

SEQ ID NO: 629 - DNA, 32 bp, Artificial sequence
  Artificial aptamer to AFP,MMP9v
caggggggtgggagggtggatggttgcggtgg

SEQ ID NO: 630 - DNA, 32 bp, Artificial sequence
  Artificial aptamer to AFP
caggggggtgggagggtggatgttagcggtgg

SEQ ID NO: 631 - DNA, 32 bp, Artificial sequence
  Artificial aptamer to AFP
caggggggtgggagggtggatggtagcgatgg

SEQ ID NO: 632 - DNA, 32 bp, Artificial sequence
  Artificial aptamer to MMP9v
caggggggtgggagggtggatggtagcggagg

SEQ ID NO: 633 - DNA, 32 bp, Artificial sequence
  Artificial aptamer to MMP9v
caggggggtgggagggtggatggtagcggtgg

SEQ ID NO: 634 - DNA, 32 bp, Artificial sequence
  Artificial aptamer to AFP
caggggggtgggagggtggatggtagcggttg

SEQ ID NO: 635 - DNA, 32 bp, Artificial sequence
  Artificial aptamer to MMP9v
caggggggtgggagggtggatggtagtggtgg

SEQ ID NO: 636 - DNA, 32 bp, Artificial sequence
  Artificial aptamer to MMP9v
caggggggtgggggggaggatggtagcggtgg

SEQ ID NO: 637 - DNA, 32 bp, Artificial sequence
  Artificial aptamer to AFP,MMP9v
caggggggtgggtgggtggatggtagcggtgg

SEQ ID NO: 638 - DNA, 32 bp, Artificial sequence
  Artificial aptamer to MMP9v
caggggggtgggtgggtggatggtggcgatgg

SEQ ID NO: 639 - DNA, 32 bp, Artificial sequence
  Artificial aptamer to MMP9v
caggggggttggagggtggatggtagcggtgg

SEQ ID NO: 640 - DNA, 32 bp, Artificial sequence
  Artificial aptamer to AFP
cagggggtgggcgggtggaagttactagttta

SEQ ID NO: 641 - DNA, 32 bp, Artificial sequence
  Artificial aptamer to MMP9v
cagggggtgggtgggtggagtgtagggtttcg

SEQ ID NO: 642 - DNA, 32 bp, Artificial sequence
  Artificial aptamer to MMP9v
cagggtagggagggcgggaaaatgagcggcta

SEQ ID NO: 643 - DNA, 32 bp, Artificial sequence
  Artificial aptamer to IGE
caggggtgggagggagggtataatgagcgtgg

SEQ ID NO: 644 - DNA, 32 bp, Artificial sequence
  Artificial aptamer to IGE
caggggtgggagggagggtataatgagggtgg

SEQ ID NO: 645 - DNA, 32 bp, Artificial sequence
  Artificial aptamer to IGE
cagggtgggggggagggcaaaagcgggtacat

SEQ ID NO: 646 - DNA, 32 bp, Artificial sequence
  Artificial aptamer to MMP9v
cagggttgggagggtgggtagagaggcgatta

SEQ ID NO: 647 - DNA, 32 bp, Artificial sequence
  Artificial aptamer to MMP9v
caggagaagtcggtgggggggtgggaggagac

SEQ ID NO: 648 - DNA, 32 bp, Artificial sequence
  Artificial aptamer to MMP9v
caggagggtgggggggtggagtttaggggtaa

SEQ ID NO: 649 - DNA, 32 bp, Artificial sequence
  Artificial aptamer to AFP
caggagggtgggtggggggatggagcggataa

SEQ ID NO: 650 - DNA, 32 bp, Artificial sequence
  Artificial aptamer to MMP9v
caggagggggggtgggtggtaggtggaggaaa

SEQ ID NO: 651 - DNA, 32 bp, Artificial sequence
  Artificial aptamer to MMP9v
caggagggggggtgggtggtaggtggagggaa

SEQ ID NO: 652 - DNA, 32 bp, Artificial sequence
  Artificial aptamer to MMP9v
caggagggggggtgggtggtaggtggagggga

SEQ ID NO: 653 - DNA, 32 bp, Artificial sequence
  Artificial aptamer to IGE
cagggagggagggggggcaaaacatacgttta

SEQ ID NO: 654 - DNA, 32 bp, Artificial sequence
  Artificial aptamer to IGE
cagggagggagggggggtcagatgagaggaaa

SEQ ID NO: 655 - DNA, 32 bp, Artificial sequence
  Artificial aptamer to AFP
cagggagggagggtgggaacgtgggctgttaa

SEQ ID NO: 656 - DNA, 32 bp, Artificial sequence
  Artificial aptamer to MMP9v
cagggaggggagggtgggcaagagagcgagat

SEQ ID NO: 657 - DNA, 32 bp, Artificial sequence
  Artificial aptamer to MMP9v
cagggatgggtgggggggtagtaaaaaagcgt

SEQ ID NO: 658 - DNA, 32 bp, Artificial sequence
  Artificial aptamer to MMP9v
caggggagggagggggggtaaatagggcgaaa

SEQ ID NO: 659 - DNA, 32 bp, Artificial sequence
  Artificial aptamer to MMP9v
cagggggatgggggggtggatggtagcggtgg

SEQ ID NO: 660 - DNA, 32 bp, Artificial sequence
  Artificial aptamer to AFP
cagggggggagggtgggctagcgtgcggcata

SEQ ID NO: 661 - DNA, 32 bp, Artificial sequence
  Artificial aptamer to MMP9v
cagggggcgggtgggtggagtgtagggtttcg

SEQ ID NO: 662 - DNA, 32 bp, Artificial sequence
  Artificial aptamer to AFP
cagggggcgggtgggtggagtgtagggttttg

SEQ ID NO: 663 - DNA, 32 bp, Artificial sequence
  Artificial aptamer to MMP9v
caggggggagggagggtggatggtagcggtgg

SEQ ID NO: 664 - DNA, 32 bp, Artificial sequence
  Artificial aptamer to MMP9v
caggggggtggatgggtggacggtagcggtgg

SEQ ID NO: 665 - DNA, 32 bp, Artificial sequence
  Artificial aptamer to MMP9v
caggggggtgggaggatggatggtagcggtgg

SEQ ID NO: 666 - DNA, 32 bp, Artificial sequence
  Artificial aptamer to IGE
cataaaggggtgggagggggggcatagcagcg

SEQ ID NO: 667 - DNA, 32 bp, Artificial sequence
  Artificial aptamer to AFP
cataagggagggagggtgggcaggagcggctg

SEQ ID NO: 668 - DNA, 32 bp, Artificial sequence
  Artificial aptamer to IGE
catagggagggagggtgggtcaattgacggga

SEQ ID NO: 669 - DNA, 32 bp, Artificial sequence
  Artificial aptamer to MMP9v
catagggagggagggcgggaaagatagcgtga

SEQ ID NO: 670 - DNA, 32 bp, Artificial sequence
  Artificial aptamer to MMP9v
catagggggcgggtgggtggtatgtgatcgta

SEQ ID NO: 671 - DNA, 32 bp, Artificial sequence
  Artificial aptamer to AFP
caggtgggcgggtggggggatgatgaagcggt

SEQ ID NO: 672 - DNA, 32 bp, Artificial sequence
  Artificial aptamer to AFP
caggtgggtgggagggtggatggtagcggtgg

SEQ ID NO: 673 - DNA, 32 bp, Artificial sequence
  Artificial aptamer to IGE
cagtaagggagggagggggggcaaagcgtgat

SEQ ID NO: 674 - DNA, 32 bp, Artificial sequence
  Artificial aptamer to AFP
cagtagggggggagggtgggcaagtaagttga

SEQ ID NO: 675 - DNA, 32 bp, Artificial sequence
  Artificial aptamer to MMP9v
cagtgggagggtgggtggaagtaagggcggaa

SEQ ID NO: 676 - DNA, 32 bp, Artificial sequence
  Artificial aptamer to AFP
cagtgggagggtgggtggaagtaaaagcggaa

SEQ ID NO: 677 - DNA, 32 bp, Artificial sequence
  Artificial aptamer to IGE
cagtgggagggtgggtggaagtaaaggcggat

SEQ ID NO: 678 - DNA, 32 bp, Artificial sequence
  Artificial aptamer to AFP
cagtgggagggtgggtggaagtaaaggcggta

SEQ ID NO: 679 - DNA, 32 bp, Artificial sequence
  Artificial aptamer to MMP9v
cagtgggagggtgggtggtagtaagggcggaa

SEQ ID NO: 680 - DNA, 32 bp, Artificial sequence
  Artificial aptamer to IGE
cagtgggggcgggtgggtggcgtggacggtta

SEQ ID NO: 681 - DNA, 32 bp, Artificial sequence
  Artificial aptamer to IGE
cagtgggtgggagggcggagtagaaggcgtta

SEQ ID NO: 682 - DNA, 32 bp, Artificial sequence
  Artificial aptamer to MMP9v
cagtgggtgggagggtggagttgggaaggtag

SEQ ID NO: 683 - DNA, 32 bp, Artificial sequence
  Artificial aptamer to MMP9v
cagtgggtgggtgggtggagggaagagggtaa

SEQ ID NO: 684 - DNA, 32 bp, Artificial sequence
  Artificial aptamer to MMP9v
cagtgggtgggtgggtggaaagggagccgttt

SEQ ID NO: 685 - DNA, 32 bp, Artificial sequence
  Artificial aptamer to AFP
cagtgggtgggtgggtggaagtaaaggcggaa

SEQ ID NO: 686 - DNA, 32 bp, Artificial sequence
  Artificial aptamer to AFP
cagtgggtgggtgggtggcgttagtaaagtta

SEQ ID NO: 687 - DNA, 32 bp, Artificial sequence
  Artificial aptamer to AFP,IGE,MMP9v
catgggagggagggggggtaaaatgagagtga

SEQ ID NO: 688 - DNA, 32 bp, Artificial sequence
  Artificial aptamer to MMP9v
catgggagggagggggggtaaaatgagagtta

SEQ ID NO: 689 - DNA, 32 bp, Artificial sequence
  Artificial aptamer to MMP9v
catgggggagggagggtggatggtagcggtgg

SEQ ID NO: 690 - DNA, 32 bp, Artificial sequence
  Artificial aptamer to IGE
catgggggggtgggagggtatataaagcgtgg

SEQ ID NO: 691 - DNA, 32 bp, Artificial sequence
  Artificial aptamer to IGE
catggggtgggagggagggcaagaagacgttt

SEQ ID NO: 692 - DNA, 32 bp, Artificial sequence
  Artificial aptamer to AFP
catggtgggcgggcggggggattagagagcgt

SEQ ID NO: 693 - DNA, 32 bp, Artificial sequence
  Artificial aptamer to IGE
catgtgggtgggagggtggtaggtagagttta

SEQ ID NO: 694 - DNA, 32 bp, Artificial sequence
  Artificial aptamer to MMP9v
catgtgggtgggtggggggaaagaacgtttca

SEQ ID NO: 695 - DNA, 32 bp, Artificial sequence
  Artificial aptamer to IGE
cattgggggggggagggagggtaaagaagcgt

SEQ ID NO: 696 - DNA, 32 bp, Artificial sequence
  Artificial aptamer to AFP
ccaaagggtgggagggagggcggttgaggtga

SEQ ID NO: 697 - DNA, 32 bp, Artificial sequence
  Artificial aptamer to AFP
ccagggtgggagggagggcaaggagcgcaaaa

SEQ ID NO: 698 - DNA, 32 bp, Artificial sequence
  Artificial aptamer to AFP
ccagtgggcgggcgggaggagggcggcgttga

SEQ ID NO: 699 - DNA, 32 bp, Artificial sequence
  Artificial aptamer to MMP9v
ccagtgggggggtgggtggaggtggtgttata

SEQ ID NO: 700 - DNA, 32 bp, Artificial sequence
  Artificial aptamer to IGE
ccatgtaggtgggtgggaggttggttgagaag

SEQ ID NO: 701 - DNA, 32 bp, Artificial sequence
  Artificial aptamer to MMP9v
tatgtgggggggtgggtggaagagggagtgta

SEQ ID NO: 702 - DNA, 32 bp, Artificial sequence
  Artificial aptamer to AFP
tatgtgggggggtgggtggaagagggagttta

SEQ ID NO: 703 - DNA, 32 bp, Artificial sequence
  Artificial aptamer to MMP9v
tatgtgggggggtgggtggaagtgggagtgta

SEQ ID NO: 704 - DNA, 32 bp, Artificial sequence
  Artificial aptamer to AFP
tatgtgggagggtgggtggtcagaggcgtttg

SEQ ID NO: 705 - DNA, 32 bp, Artificial sequence
  Artificial aptamer to MMP9v
tatgtgggtgggtgggtggatacaagggttga

SEQ ID NO: 706 - DNA, 32 bp, Artificial sequence
  Artificial aptamer to MMP9v
tatgtgggggggtgggtggttttataagtgta

SEQ ID NO: 707 - DNA, 32 bp, Artificial sequence
  Artificial aptamer to MMP9v
tatgtgggtgggtgggcggatactagggttga

SEQ ID NO: 708 - DNA, 32 bp, Artificial sequence
  Artificial aptamer to MMP9v
tatgtgggtgggtggggggaaagaacgtttca

SEQ ID NO: 709 - DNA, 32 bp, Artificial sequence
  Artificial aptamer to AFP,MMP9v
tatgtgggtgggtgggtggatactagggttga

SEQ ID NO: 710 - DNA, 32 bp, Artificial sequence
  Artificial aptamer to MMP9v
tattagggggggtttgggtgggtcagcggata

SEQ ID NO: 711 - DNA, 32 bp, Artificial sequence
  Artificial aptamer to AFP,MMP9v
tattatgggagggtgggtagggtatagcgtag

SEQ ID NO: 712 - DNA, 32 bp, Artificial sequence
  Artificial aptamer to MMP9v
tattatgggggggtgggtagggtatagcgtag

SEQ ID NO: 713 - DNA, 32 bp, Artificial sequence
  Artificial aptamer to AFP,MMP9v
tattgggcgggggggtagggataaagcggaaa

SEQ ID NO: 714 - DNA, 32 bp, Artificial sequence
  Artificial aptamer to IGE
tatttagggagggagggcgggcatagcgataa

SEQ ID NO: 715 - DNA, 32 bp, Artificial sequence
  Artificial aptamer to IGE
tatttagggagggagggggggataaaggttaa

SEQ ID NO: 716 - DNA, 32 bp, Artificial sequence
  Artificial aptamer to IGE
tattgtgggtgggtgggtggattacagtttac

SEQ ID NO: 717 - DNA, 32 bp, Artificial sequence
  Artificial aptamer to AFP
tattgtgggtgggtgggtggattatagtttac

SEQ ID NO: 718 - DNA, 32 bp, Artificial sequence
  Artificial aptamer to IGE
tcaaagggagggagggggggcaaaaacgttaa

SEQ ID NO: 719 - DNA, 32 bp, Artificial sequence
  Artificial aptamer to MMP9v
tagtgggtgggtgggcggagagggcggaaaga

SEQ ID NO: 720 - DNA, 32 bp, Artificial sequence
  Artificial aptamer to IGE
tagtgggtgggtggggggtaattaaagcgatg

SEQ ID NO: 721 - DNA, 32 bp, Artificial sequence
  Artificial aptamer to AFP
tagtgggtgggtgggtggaaggagcgtgataa

SEQ ID NO: 722 - DNA, 32 bp, Artificial sequence
  Artificial aptamer to IGE
tagtgggtgggtgggtggaataaagagtgtac

SEQ ID NO: 723 - DNA, 32 bp, Artificial sequence
  Artificial aptamer to AFP
tagtgggtgggtgggtggaataaagagtgtgg

SEQ ID NO: 724 - DNA, 32 bp, Artificial sequence
  Artificial aptamer to AFP
tagtgggtgggtgggtggaatagagagtgtag

SEQ ID NO: 725 - DNA, 32 bp, Artificial sequence
  Artificial aptamer to AFP
tagtggtgggtgggagggggagcgtagaggct

SEQ ID NO: 726 - DNA, 32 bp, Artificial sequence
  Artificial aptamer to IGE
tatagggagggagggtgggaaggatagcgtga

SEQ ID NO: 727 - DNA, 32 bp, Artificial sequence
  Artificial aptamer to IGE
tatagggagggagggtgggtttagcgtaggga

SEQ ID NO: 728 - DNA, 32 bp, Artificial sequence
  Artificial aptamer to AFP,IGE
tatatagggagggagggcgggcatagcgataa

SEQ ID NO: 729 - DNA, 32 bp, Artificial sequence
  Artificial aptamer to IGE
tatattcagggagggcgggagggtcagcggta

SEQ ID NO: 730 - DNA, 32 bp, Artificial sequence
  Artificial aptamer to IGE
tatcggggagggagggggggcaaatgcgtaaa

SEQ ID NO: 731 - DNA, 32 bp, Artificial sequence
  Artificial aptamer to IGE
tatcggggggggagggggggcaaatgcgataa

SEQ ID NO: 732 - DNA, 32 bp, Artificial sequence
  Artificial aptamer to MMP9v
tatgggatgggagggggggtaaatcaagtata

SEQ ID NO: 733 - DNA, 32 bp, Artificial sequence
  Artificial aptamer to MMP9v
tatgggatgggagggtgggaaaggtaggtttg

SEQ ID NO: 734 - DNA, 32 bp, Artificial sequence
  Artificial aptamer to MMP9v
tatgggattcgggtgggggggaaaagggatta

SEQ ID NO: 735 - DNA, 32 bp, Artificial sequence
  Artificial aptamer to IGE
tatgggagggggggaggggtaaaaactgcgta

SEQ ID NO: 736 - DNA, 32 bp, Artificial sequence
  Artificial aptamer to MMP9v
tatgggggggggtgggtggaatgagagcagga

SEQ ID NO: 737 - DNA, 32 bp, Artificial sequence
  Artificial aptamer to MMP9v
tatggggatcgggtgggggggcaaagcgtgaa

SEQ ID NO: 738 - DNA, 32 bp, Artificial sequence
  Artificial aptamer to MMP9v
tatgggggtgggtgggtggagatgggtgtgta

SEQ ID NO: 739 - DNA, 32 bp, Artificial sequence
  Artificial aptamer to MMP9v
tatggggtcgggggggtggggataaagcggca

SEQ ID NO: 740 - DNA, 32 bp, Artificial sequence
  Artificial aptamer to IGE
tatggtgggggggagggagggatagaagttta

SEQ ID NO: 741 - DNA, 32 bp, Artificial sequence
  Artificial aptamer to AFP
tcaagggggggagggagggcaggagcgcctta

SEQ ID NO: 742 - DNA, 32 bp, Artificial sequence
  Artificial aptamer to AFP
tcaagggtgggggggagggcaaattgggattt

SEQ ID NO: 743 - DNA, 32 bp, Artificial sequence
  Artificial aptamer to AFP,MMP9v
tcaagggttgggagggggggcagagagcgtgg

SEQ ID NO: 744 - DNA, 32 bp, Artificial sequence
  Artificial aptamer to MMP9v
tcagtgggtgggagggtggaagggcagggcgt

SEQ ID NO: 745 - DNA, 32 bp, Artificial sequence
  Artificial aptamer to IGE
tcagtgggtgggtgggaggtaaattgagagta

SEQ ID NO: 746 - DNA, 32 bp, Artificial sequence
  Artificial aptamer to IGE
tcatagggagggagggggggcacagcggttaa

SEQ ID NO: 747 - DNA, 32 bp, Artificial sequence
  Artificial aptamer to IGE
tcaggggagggggggtgggtcaatgcgtgcaa

SEQ ID NO: 748 - DNA, 32 bp, Artificial sequence
  Artificial aptamer to IGE
tcagggtgggagggagggcaaggagcgcaaaa

SEQ ID NO: 749 - DNA, 32 bp, Artificial sequence
  Artificial aptamer to MMP9v
tcagggtgtggtggggggggtttcaagcgtgt

SEQ ID NO: 750 - DNA, 32 bp, Artificial sequence
  Artificial aptamer to AFP
tcagtgggggggtgggtggaggtggtgttata

SEQ ID NO: 751 - DNA, 32 bp, Artificial sequence
  Artificial aptamer to IGE
tcatgggaagggtgggggggtactatgagcgg

SEQ ID NO: 752 - DNA, 32 bp, Artificial sequence
  Artificial aptamer to IGE
tcatgggtagggtgggggggtactatgagcgg

SEQ ID NO: 753 - DNA, 32 bp, Artificial sequence
  Artificial aptamer to MMP9v
tcggagggcgggagggtggtgattgtgggtgg

SEQ ID NO: 754 - DNA, 32 bp, Artificial sequence
  Artificial aptamer to MMP9v
tcggagggcgggggggtggtgattgtgggtgg

SEQ ID NO: 755 - DNA, 32 bp, Artificial sequence
  Artificial aptamer to MMP9v
tcggagggggggtgggaggagataagtgggta

SEQ ID NO: 756 - DNA, 32 bp, Artificial sequence
  Artificial aptamer to IGE
tcgaacgcaatgtgggagggtgggtggatgcg

SEQ ID NO: 757 - DNA, 32 bp, Artificial sequence
  Artificial aptamer to MMP9v
tcgagggggggtgggtggtaaagagtgggaaa

SEQ ID NO: 758 - DNA, 32 bp, Artificial sequence
  Artificial aptamer to IGE
tcgagggtgggtgggtggaaatttcgcgtttg

SEQ ID NO: 759 - DNA, 32 bp, Artificial sequence
  Artificial aptamer to AFP
tcgagggtgggtgggtggtcaaaagagcggaa

SEQ ID NO: 760 - DNA, 32 bp, Artificial sequence
  Artificial aptamer to IGE
tcgagggtgggtgggtggtcaaaagagcggag

SEQ ID NO: 761 - DNA, 32 bp, Artificial sequence
  Artificial aptamer to AFP
tcgtgggagggtgggtggaaaagagatgatta

SEQ ID NO: 762 - DNA, 32 bp, Artificial sequence
  Artificial aptamer to AFP
tcgtgggagggtgggtggaaaggagatgatta

SEQ ID NO: 763 - DNA, 32 bp, Artificial sequence
  Artificial aptamer to IGE
tcgtgggtgggtgggtggaaattggagctaaa

SEQ ID NO: 764 - DNA, 32 bp, Artificial sequence
  Artificial aptamer to AFP
tcgtgggtgggtgggtggaaattggagctaag

SEQ ID NO: 765 - DNA, 32 bp, Artificial sequence
  Artificial aptamer to MMP9v
tcgtgggtgggtcgggggggtaaaagagatta

SEQ ID NO: 766 - DNA, 32 bp, Artificial sequence
  Artificial aptamer to AFP
tcgtgggtgggtgggaggcaaagagcggcgta

SEQ ID NO: 767 - DNA, 32 bp, Artificial sequence
  Artificial aptamer to IGE
tcgggagggagggttgggataaaagagcgtag

SEQ ID NO: 768 - DNA, 32 bp, Artificial sequence
  Artificial aptamer to MMP9v
tcgggagggggggtgggtaaaagaggggtaga

SEQ ID NO: 769 - DNA, 32 bp, Artificial sequence
  Artificial aptamer to MMP9v
tcggggagggttgggtgggtaaaaatggggcg

SEQ ID NO: 770 - DNA, 32 bp, Artificial sequence
  Artificial aptamer to AFP,MMP9v
tcgggggggggtgggtggtaaagagtgggaaa

SEQ ID NO: 771 - DNA, 32 bp, Artificial sequence
  Artificial aptamer to MMP9v
tcgggggtgggtgggtggtaaagagtgggaag

SEQ ID NO: 772 - DNA, 32 bp, Artificial sequence
  Artificial aptamer to AFP
tcgggggtgggtgggtggaaaagaaacggata

SEQ ID NO: 773 - DNA, 32 bp, Artificial sequence
  Artificial aptamer to IGE
tcggggtgggagggagggcatacaagagcagt

SEQ ID NO: 774 - DNA, 32 bp, Artificial sequence
  Artificial aptamer to MMP9v
tcggggtgggagggagggcatataagagcagc

SEQ ID NO: 775 - DNA, 32 bp, Artificial sequence
  Artificial aptamer to MMP9v
tcgggtgggctgggggggtatgagcgaataga

SEQ ID NO: 776 - DNA, 32 bp, Artificial sequence
  Artificial aptamer to IGE
tcgggtgggagggagggcaaaaagaggtgcta

SEQ ID NO: 777 - DNA, 32 bp, Artificial sequence
  Artificial aptamer to MMP9v
tcgggtgggtatagggtgggcaagcggggata

SEQ ID NO: 778 - DNA, 32 bp, Artificial sequence
  Artificial aptamer to IGE
tcgggtgggtggggattaaaaattaaagtccc

SEQ ID NO: 779 - DNA, 32 bp, Artificial sequence
  Artificial aptamer to IGE
tcgggtgggtgggtaaaacaagcagaaatgca

SEQ ID NO: 780 - DNA, 32 bp, Artificial sequence
  Artificial aptamer to IGE
tcgggttgggggggagggtaaaagtgcgggga

SEQ ID NO: 781 - DNA, 32 bp, Artificial sequence
  Artificial aptamer to MMP9v
tcggtaggggggtgggtggagatcatagcgcg

SEQ ID NO: 782 - DNA, 32 bp, Artificial sequence
  Artificial aptamer to AFP
tcggtgggggggcgggtggagtcatgagcggt

SEQ ID NO: 783 - DNA, 32 bp, Artificial sequence
  Artificial aptamer to AFP
tcggtgggggggcgggtggtgatgagagataa

SEQ ID NO: 784 - DNA, 32 bp, Artificial sequence
  Artificial aptamer to IGE
tcggtgggggggtgggaggagataagtgggta

SEQ ID NO: 785 - DNA, 32 bp, Artificial sequence
  Artificial aptamer to AFP
tcgtgggtgggtgggtggaaatttgagctaag

SEQ ID NO: 786 - DNA, 32 bp, Artificial sequence
  Artificial aptamer to IGE,MMP9v
tctagggagggggggtgggcaagagcgtgaca

SEQ ID NO: 787 - DNA, 32 bp, Artificial sequence
  Artificial aptamer to AFP
tctagggagggggggtgggcgagagcgtgaca

SEQ ID NO: 788 - DNA, 32 bp, Artificial sequence
  Artificial aptamer to AFP,MMP9v
tgacggagggagggtgggtggagtcgcgaggg

SEQ ID NO: 789 - DNA, 32 bp, Artificial sequence
  Artificial aptamer to IGE
tgagaacaaaggagggagggtgatattattag

SEQ ID NO: 790 - DNA, 32 bp, Artificial sequence
  Artificial aptamer to IGE
tgaggagaagtcggtggggggtgggaggagac

SEQ ID NO: 791 - DNA, 32 bp, Artificial sequence
  Artificial aptamer to IGE
tctgtgggtgggtgggaggtaaactgagagtg

SEQ ID NO: 792 - DNA, 32 bp, Artificial sequence
  Artificial aptamer to IGE
tctgtgggtgggtgggaagggaaacagcggag

SEQ ID NO: 793 - DNA, 32 bp, Artificial sequence
  Artificial aptamer to MMP9v
tctgtgggtgggtgggaggtaaattgagggtg

SEQ ID NO: 794 - DNA, 32 bp, Artificial sequence
  Artificial aptamer to IGE
tcttcgggtgggtcgggggggttctaagagcg

SEQ ID NO: 795 - DNA, 32 bp, Artificial sequence
  Artificial aptamer to IGE
tgaagagggagggagggtgggtggtagtgcgt

SEQ ID NO: 796 - DNA, 32 bp, Artificial sequence
  Artificial aptamer to IGE
tgaagggagggagggtgggttttagcgtccaa

SEQ ID NO: 797 - DNA, 32 bp, Artificial sequence
  Artificial aptamer to MMP9v
tgaagggatgggagggtgggattaagctgaaa

SEQ ID NO: 798 - DNA, 32 bp, Artificial sequence
  Artificial aptamer to MMP9v
tgaataagggagggggggtgggcacgcgttca

SEQ ID NO: 799 - DNA, 32 bp, Artificial sequence
  Artificial aptamer to AFP,MMP9v
tgaatgggtcgggtgggagggtatgagcgcgt

SEQ ID NO: 800 - DNA, 32 bp, Artificial sequence
  Artificial aptamer to IGE
ctagagggtgggtgggtggaagaaagcgataa

SEQ ID NO: 801 - DNA, 32 bp, Artificial sequence
  Artificial aptamer to AFP
ctagagggtgggtgggtggaagagagcgagaa

SEQ ID NO: 802 - DNA, 32 bp, Artificial sequence
  Artificial aptamer to AFP
ctagagggtgggtgggtggaagtaagcgagaa

SEQ ID NO: 803 - DNA, 32 bp, Artificial sequence
  Artificial aptamer to IGE
ctagggagggagggggggcaaaaataagcgca

SEQ ID NO: 804 - DNA, 32 bp, Artificial sequence
  Artificial aptamer to IGE
ctagggagggagggggggcaaaaatgagcgca

SEQ ID NO: 805 - DNA, 32 bp, Artificial sequence
  Artificial aptamer to MMP9v
ctagggaggggcgggtgggtaataaggcgtga

SEQ ID NO: 806 - DNA, 32 bp, Artificial sequence
  Artificial aptamer to AFP,MMP9v
ctagggatgggcgggcgggcaaaagagcggga

SEQ ID NO: 807 - DNA, 32 bp, Artificial sequence
  Artificial aptamer to AFP,IGE
ctagggtgggggggagggcaacggagcgtaaa

SEQ ID NO: 808 - DNA, 32 bp, Artificial sequence
  Artificial aptamer to AFP
ctagggtgggggggagggcaacgtagcgtaag

SEQ ID NO: 809 - DNA, 32 bp, Artificial sequence
  Artificial aptamer to IGE
ctatgggagggagggggggtacactaaagcgt

SEQ ID NO: 810 - DNA, 32 bp, Artificial sequence
  Artificial aptamer to MMP9v
ctcagggagggtgggggggccaaaagaagcgt

SEQ ID NO: 811 - DNA, 32 bp, Artificial sequence
  Artificial aptamer to IGE
ctcatagggagggagggggggccaggagcgtg

SEQ ID NO: 812 - DNA, 32 bp, Artificial sequence
  Artificial aptamer to AFP
ctgacgaaataagagggtgggtgggtggacat

SEQ ID NO: 813 - DNA, 32 bp, Artificial sequence
  Artificial aptamer to AFP
ctgacgaaataggtgggtgggtgggtggacat

SEQ ID NO: 814 - DNA, 32 bp, Artificial sequence
  Artificial aptamer to AFP
ctggtgggcgggcggggggaagtgtagcgtgt

SEQ ID NO: 815 - DNA, 32 bp, Artificial sequence
  Artificial aptamer to MMP9v
ctggtgggcgggcggggggaagagcagcgtgt

SEQ ID NO: 816 - DNA, 32 bp, Artificial sequence
  Artificial aptamer to IGE
ctggtgggcgggcggggggaagagtagcgcgt

SEQ ID NO: 817 - DNA, 32 bp, Artificial sequence
  Artificial aptamer to IGE
ctggtgggcgggcggggggaagagtagcgtat

SEQ ID NO: 818 - DNA, 32 bp, Artificial sequence
  Artificial aptamer to AFP
ctggtgggcgggcggggggaagagtagcgtga

SEQ ID NO: 819 - DNA, 32 bp, Artificial sequence
  Artificial aptamer to AFP
ctggtgggcgggcggggggaagagtagcgtgg

SEQ ID NO: 820 - DNA, 32 bp, Artificial sequence
  Artificial aptamer to AFP
ctggtgggcgggcggggggaagagtagtgtgt

SEQ ID NO: 821 - DNA, 32 bp, Artificial sequence
  Artificial aptamer to AFP
ctggtgggcgggcgggtggaagagtagcgtgt

SEQ ID NO: 822 - DNA, 32 bp, Artificial sequence
  Artificial aptamer to IGE
ctggtgggtgggagggtggatggtagcggtgg

SEQ ID NO: 823 - DNA, 32 bp, Artificial sequence
  Artificial aptamer to IGE
ctggagaaattttgggtgggagggggggtcat

SEQ ID NO: 824 - DNA, 32 bp, Artificial sequence
  Artificial aptamer to IGE
ctgggagggagggtgggtcagataaagtgcgg

SEQ ID NO: 825 - DNA, 32 bp, Artificial sequence
  Artificial aptamer to MMP9v
ctgggggggattgggtgggcaaatataagcgt

SEQ ID NO: 826 - DNA, 32 bp, Artificial sequence
  Artificial aptamer to IGE
ctggggtgggggggatgggtagtacagcgtta

SEQ ID NO: 827 - DNA, 32 bp, Artificial sequence
  Artificial aptamer to MMP9v
ctggggggtgggagggtggatggtagcggtgg

SEQ ID NO: 828 - DNA, 32 bp, Artificial sequence
  Artificial aptamer to AFP
ctggtgggcgggcggggggaagaatagcgtgt

SEQ ID NO: 829 - DNA, 32 bp, Artificial sequence
  Artificial aptamer to AFP
ctggtgggcgggcggggggaagagaagcgtgt

SEQ ID NO: 830 - DNA, 32 bp, Artificial sequence
  Artificial aptamer to IGE
cttcgggagggagggtgggtcagagggtgaca

SEQ ID NO: 831 - DNA, 32 bp, Artificial sequence
  Artificial aptamer to AFP
ctgtcgaaataagtgggtgggtgggtggacat

SEQ ID NO: 832 - DNA, 32 bp, Artificial sequence
  Artificial aptamer to MMP9v
ctgtgggtgggagggtggaatagagcgggtag

SEQ ID NO: 833 - DNA, 32 bp, Artificial sequence
  Artificial aptamer to AFP
ctgtgggtgggcgggcggaaattgaggtatta

SEQ ID NO: 834 - DNA, 32 bp, Artificial sequence
  Artificial aptamer to IGE
ctgtgggtgggtgagaggcaaagagcggcgta

SEQ ID NO: 835 - DNA, 32 bp, Artificial sequence
  Artificial aptamer to IGE
cttaagggtgggtagggagggtcaagagcgtg

SEQ ID NO: 836 - DNA, 32 bp, Artificial sequence
  Artificial aptamer to IGE
cttagggagggagggtgggcaaaagcggctca

SEQ ID NO: 837 - DNA, 32 bp, Artificial sequence
  Artificial aptamer to IGE,MMP9v
cttagggagggggggcgggcaaatcacagcgt

SEQ ID NO: 838 - DNA, 32 bp, Artificial sequence
  Artificial aptamer to MMP9v
cttagggagggggggcgggcaaattacagcgt

SEQ ID NO: 839 - DNA, 32 bp, Artificial sequence
  Artificial aptamer to IGE
gaagggtgggagggagggcaggtgcaggttta

SEQ ID NO: 840 - DNA, 32 bp, Artificial sequence
  Artificial aptamer to AFP
gaaggtgggagggtgggtggatcggcgctttg

SEQ ID NO: 841 - DNA, 32 bp, Artificial sequence
  Artificial aptamer to IGE
gaaggtgggcgggtgggtggattatagttgcg

SEQ ID NO: 842 - DNA, 32 bp, Artificial sequence
  Artificial aptamer to AFP
gaaggtgggggggtgggtggattatagtagcg

SEQ ID NO: 843 - DNA, 32 bp, Artificial sequence
  Artificial aptamer to AFP
gaaggtgggtgggtgggtggattatagtagcg

SEQ ID NO: 844 - DNA, 32 bp, Artificial sequence
  Artificial aptamer to MMP9v
gaagtgggtgggggggtggtcgagagtgggaa

SEQ ID NO: 845 - DNA, 32 bp, Artificial sequence
  Artificial aptamer to IGE
gaatcgggagggcgggagggcaagaaagttga

SEQ ID NO: 846 - DNA, 32 bp, Artificial sequence
  Artificial aptamer to IGE
gaatagggggggagggagggttaagagtttac

SEQ ID NO: 847 - DNA, 32 bp, Artificial sequence
  Artificial aptamer to MMP9v
gaatgggaggggtgggggggtaagaggtttaa

SEQ ID NO: 848 - DNA, 32 bp, Artificial sequence
  Artificial aptamer to AFP
cttggagggtgggcgggtggaaagaaagcgta

SEQ ID NO: 849 - DNA, 32 bp, Artificial sequence
  Artificial aptamer to MMP9v
cttgggtgggggggagggaaaagagcgtcaag

SEQ ID NO: 850 - DNA, 32 bp, Artificial sequence
  Artificial aptamer to MMP9v
ctttcagggtgggtcgggcgggatagcgggga

SEQ ID NO: 851 - DNA, 32 bp, Artificial sequence
  Artificial aptamer to MMP9v
gaaaaagggggggagggagggaaagagagcgg

SEQ ID NO: 852 - DNA, 32 bp, Artificial sequence
  Artificial aptamer to AFP,IGE
cttttgggtgggagggagggttagttgcgtaa

SEQ ID NO: 853 - DNA, 32 bp, Artificial sequence
  Artificial aptamer to IGE
gaaaagggggggagggagggtaaaaagagcgg

SEQ ID NO: 854 - DNA, 32 bp, Artificial sequence
  Artificial aptamer to MMP9v
gaaacgagtggggggtgggagggtggaactcg

SEQ ID NO: 855 - DNA, 32 bp, Artificial sequence
  Artificial aptamer to AFP
gaaacgttggtgggaagggcgggtggaaacgg

SEQ ID NO: 856 - DNA, 32 bp, Artificial sequence
  Artificial aptamer to MMP9v
gaaaggggggggagggtgggttaagagcggta

SEQ ID NO: 857 - DNA, 32 bp, Artificial sequence
  Artificial aptamer to AFP
gaaagggagggagggtgggcaaagatcgttga

SEQ ID NO: 858 - DNA, 32 bp, Artificial sequence
  Artificial aptamer to IGE,MMP9v
gaaagggagggagggtgggcaaggatcgttga

SEQ ID NO: 859 - DNA, 32 bp, Artificial sequence
  Artificial aptamer to AFP
gaaagggagggagggtgggcgaggatcgttga

SEQ ID NO: 860 - DNA, 32 bp, Artificial sequence
  Artificial aptamer to AFP,IGE,MMP9v
gaaaggggagggagggggggtaaaggcgttaa

SEQ ID NO: 861 - DNA, 32 bp, Artificial sequence
  Artificial aptamer to MMP9v
gaaagggtgggggggatgggcttcagcggtca

SEQ ID NO: 862 - DNA, 32 bp, Artificial sequence
  Artificial aptamer to MMP9v
gaaagtaccggggggtgggagggtggtggact

SEQ ID NO: 863 - DNA, 32 bp, Artificial sequence
  Artificial aptamer to IGE,MMP9v
gaaatatgggagggagggggggtaaagcgtaa

SEQ ID NO: 864 - DNA, 32 bp, Artificial sequence
  Artificial aptamer to IGE
gaaatatgggagggagggggggtaaggcgtag

SEQ ID NO: 865 - DNA, 32 bp, Artificial sequence
  Artificial aptamer to IGE
gaaatatgggagggagggggggtaaggcgtat

SEQ ID NO: 866 - DNA, 32 bp, Artificial sequence
  Artificial aptamer to AFP
gaagaacaaaggagggagggtgggtggattag

SEQ ID NO: 867 - DNA, 32 bp, Artificial sequence
  Artificial aptamer to MMP9v
gaagagggtgggtgggtggtaacgagtgggta

SEQ ID NO: 868 - DNA, 32 bp, Artificial sequence
  Artificial aptamer to MMP9v
gaagagggagggagggggggcataaacgctta

SEQ ID NO: 869 - DNA, 32 bp, Artificial sequence
  Artificial aptamer to MMP9v
gaagggagggagggggggtaaaagcagtatta

SEQ ID NO: 870 - DNA, 32 bp, Artificial sequence
  Artificial aptamer to IGE
gaagggagggagggggggtatataagcgcgcg

SEQ ID NO: 871 - DNA, 32 bp, Artificial sequence
  Artificial aptamer to MMP9v
gaagggagggaggggtgggtagaaaagtgcaa

SEQ ID NO: 872 - DNA, 32 bp, Artificial sequence
  Artificial aptamer to MMP9v
gaagggagggagggtgggcaagcgtaaagatg

SEQ ID NO: 873 - DNA, 32 bp, Artificial sequence
  Artificial aptamer to IGE
gaagggagggcgggttgggcaaagcgttgtta

SEQ ID NO: 874 - DNA, 32 bp, Artificial sequence
  Artificial aptamer to AFP
gaaggggggagggcgggtggattattgaagta

SEQ ID NO: 875 - DNA, 32 bp, Artificial sequence
  Artificial aptamer to MMP9v
gaagggggggtagggtgggcaaatcaagtgca

SEQ ID NO: 876 - DNA, 32 bp, Artificial sequence
  Artificial aptamer to MMP9v
gaaggggaggggggggcgggcgtaggcgtaaa

SEQ ID NO: 877 - DNA, 32 bp, Artificial sequence
  Artificial aptamer to MMP9v
gaaggggttgggtgggagggcattgagtgcga

SEQ ID NO: 878 - DNA, 32 bp, Artificial sequence
  Artificial aptamer to IGE
gagagggtgggtgggtggataaggcgtattcg

SEQ ID NO: 879 - DNA, 32 bp, Artificial sequence
  Artificial aptamer to IGE
gagagggtgggtgggtggataattcgtattcg

SEQ ID NO: 880 - DNA, 32 bp, Artificial sequence
  Artificial aptamer to IGE
gagagggtgggtgggtggataatgcgtatacg

SEQ ID NO: 881 - DNA, 32 bp, Artificial sequence
  Artificial aptamer to IGE
gagagggtgggtggtgggataatgcgtattcg

SEQ ID NO: 882 - DNA, 32 bp, Artificial sequence
  Artificial aptamer to IGE
gagaggtgggagggtgggtataaagcgggaaa

SEQ ID NO: 883 - DNA, 32 bp, Artificial sequence
  Artificial aptamer to IGE
gagattagggagggagggagggtaagagcgct

SEQ ID NO: 884 - DNA, 32 bp, Artificial sequence
  Artificial aptamer to AFP
gactctgagaacggtgggaagggtgggtggag

SEQ ID NO: 885 - DNA, 32 bp, Artificial sequence
  Artificial aptamer to IGE
gagaacaaagggagggagggtgggtggattag

SEQ ID NO: 886 - DNA, 32 bp, Artificial sequence
  Artificial aptamer to IGE
gagaacaatggtgggtgggtgggtaggaatgg

SEQ ID NO: 887 - DNA, 32 bp, Artificial sequence
  Artificial aptamer to AFP
gagaacaatggtgggtgggtgggttggaatag

SEQ ID NO: 888 - DNA, 32 bp, Artificial sequence
  Artificial aptamer to AFP
gagtgggcgggtgggtggaaggagacgcttta

SEQ ID NO: 889 - DNA, 32 bp, Artificial sequence
  Artificial aptamer to MMP9v
gagtgggtgggcggggggtttgatagggtata

SEQ ID NO: 890 - DNA, 32 bp, Artificial sequence
  Artificial aptamer to IGE
gataaagggggggagggcgggcacagaagcga

SEQ ID NO: 891 - DNA, 32 bp, Artificial sequence
  Artificial aptamer to IGE
gataaagggagggagggggggctaagagcgat

SEQ ID NO: 892 - DNA, 32 bp, Artificial sequence
  Artificial aptamer to IGE
gataaagggggggagggagggcaaaagcgcaa

SEQ ID NO: 893 - DNA, 32 bp, Artificial sequence
  Artificial aptamer to IGE
gataaagggggggagggagggcaagagcgcaa

SEQ ID NO: 894 - DNA, 32 bp, Artificial sequence
  Artificial aptamer to IGE
gataagggttgggggggagggtatcagcggaa

SEQ ID NO: 895 - DNA, 32 bp, Artificial sequence
  Artificial aptamer to IGE
gataataggggggggagggagggtaaaagcgt

SEQ ID NO: 896 - DNA, 32 bp, Artificial sequence
  Artificial aptamer to MMP9v
gatagggagggcgggatgggtaaaagagcggt

SEQ ID NO: 897 - DNA, 32 bp, Artificial sequence
  Artificial aptamer to MMP9v
gatagggagggggggttgggcaaaagcgggta

SEQ ID NO: 898 - DNA, 32 bp, Artificial sequence
  Artificial aptamer to AFP,MMP9v
gatagggagggtgggtagggttaatagcgtga

SEQ ID NO: 899 - DNA, 32 bp, Artificial sequence
  Artificial aptamer to MMP9v
gatagggagggtgggtagggttaatagcgtgg

SEQ ID NO: 900 - DNA, 32 bp, Artificial sequence
  Artificial aptamer to MMP9v
gatagggagggtgggtagggttagtagcgtga

SEQ ID NO: 901 - DNA, 32 bp, Artificial sequence
  Artificial aptamer to IGE
gatatagggagggagggggggcaaagagtgaa

SEQ ID NO: 902 - DNA, 32 bp, Artificial sequence
  Artificial aptamer to IGE
gatattcagggagggcgggagggtcagcggta

SEQ ID NO: 903 - DNA, 32 bp, Artificial sequence
  Artificial aptamer to IGE
gatatagggagggagggggggcaaagagtgat

SEQ ID NO: 904 - DNA, 32 bp, Artificial sequence
  Artificial aptamer to IGE
gatatagggagggagggggggcaaagagtggt

SEQ ID NO: 905 - DNA, 32 bp, Artificial sequence
  Artificial aptamer to IGE
gatatcgggagggagggggggcaaggacgtta

SEQ ID NO: 906 - DNA, 32 bp, Artificial sequence
  Artificial aptamer to IGE
gatatcgggagggagggggggtaaggacgtta

SEQ ID NO: 907 - DNA, 32 bp, Artificial sequence
  Artificial aptamer to IGE
gagggagggagggagggtcagaaaagcgggaa

SEQ ID NO: 908 - DNA, 32 bp, Artificial sequence
  Artificial aptamer to IGE
gagggagggagggggggcataagtacattaga

SEQ ID NO: 909 - DNA, 32 bp, Artificial sequence
  Artificial aptamer to IGE
gagggagggagggtgggctagtgttgctcttg

SEQ ID NO: 910 - DNA, 32 bp, Artificial sequence
  Artificial aptamer to AFP
gagggagggagggtgggctgagcgaagttcga

SEQ ID NO: 911 - DNA, 32 bp, Artificial sequence
  Artificial aptamer to MMP9v
gagggagggtgggtggaagagcgggtaggcga

SEQ ID NO: 912 - DNA, 32 bp, Artificial sequence
  Artificial aptamer to IGE
gagggagggtgggtggtagagcgtgatcggtg

SEQ ID NO: 913 - DNA, 32 bp, Artificial sequence
  Artificial aptamer to IGE
gagggcgggcgggtggaaataagcgttgatac

SEQ ID NO: 914 - DNA, 32 bp, Artificial sequence
  Artificial aptamer to IGE
gagggatgggagggagggcaaagagtggtttg

SEQ ID NO: 915 - DNA, 32 bp, Artificial sequence
  Artificial aptamer to IGE
gagggatgggggggtgggcatgcgtttatgta

SEQ ID NO: 916 - DNA, 32 bp, Artificial sequence
  Artificial aptamer to AFP,MMP9v
gagggattttggtgggtgggggggtggaaaaa

SEQ ID NO: 917 - DNA, 32 bp, Artificial sequence
  Artificial aptamer to IGE
gaggggagggagggtgggcagttgaacggata

SEQ ID NO: 918 - DNA, 32 bp, Artificial sequence
  Artificial aptamer to AFP
gagggggggtgggtggaagagctgtttaagag

SEQ ID NO: 919 - DNA, 32 bp, Artificial sequence
  Artificial aptamer to IGE
gagggggggtgggtggtagagtgtgataggag

SEQ ID NO: 920 - DNA, 32 bp, Artificial sequence
  Artificial aptamer to MMP9v
gaggggggtgggtgggcggagattgcaggtta

SEQ ID NO: 921 - DNA, 32 bp, Artificial sequence
  Artificial aptamer to AFP
gaggggggtgggagggtggatcggagcattta

SEQ ID NO: 922 - DNA, 32 bp, Artificial sequence
  Artificial aptamer to IGE
gaggggggtgggcgggcggagattgtaggtta

SEQ ID NO: 923 - DNA, 32 bp, Artificial sequence
  Artificial aptamer to IGE
gaggggggtgggtgggcggagattgtatgtta

SEQ ID NO: 924 - DNA, 32 bp, Artificial sequence
  Artificial aptamer to MMP9v
gagggggtgggcgggtggtgcaagaggcgtga

SEQ ID NO: 925 - DNA, 32 bp, Artificial sequence
  Artificial aptamer to AFP
gagggggtgggtgggtggtaattgaaggtata

SEQ ID NO: 926 - DNA, 32 bp, Artificial sequence
  Artificial aptamer to MMP9v
gagggtcgggggggtgggctgagcgtgtaaaa

SEQ ID NO: 927 - DNA, 32 bp, Artificial sequence
  Artificial aptamer to IGE
gagggtctgggggggtgggttagttagtgtaa

SEQ ID NO: 928 - DNA, 32 bp, Artificial sequence
  Artificial aptamer to AFP
gagggtgggcgggtggatgcagcgattagaag

SEQ ID NO: 929 - DNA, 32 bp, Artificial sequence
  Artificial aptamer to AFP
gagggtgggcgggtggatgtgcggaaattatg

SEQ ID NO: 930 - DNA, 32 bp, Artificial sequence
  Artificial aptamer to IGE
gagggtgggcgggtggtaatgagcggtcttag

SEQ ID NO: 931 - DNA, 32 bp, Artificial sequence
  Artificial aptamer to AFP
gagggtgggtgggtggaagagcataagtggta

SEQ ID NO: 932 - DNA, 32 bp, Artificial sequence
  Artificial aptamer to AFP
gagggtgggtgggtggagagcgattttaagta

SEQ ID NO: 933 - DNA, 32 bp, Artificial sequence
  Artificial aptamer to AFP
gagggtgggtgggtggtgcgagtagttttcgg

SEQ ID NO: 934 - DNA, 32 bp, Artificial sequence
  Artificial aptamer to MMP9v
gagggttgggagggtgggcatatgagtggaga

SEQ ID NO: 935 - DNA, 32 bp, Artificial sequence
  Artificial aptamer to IGE
gagggttgggggggtgggcacagagcgtgggt

SEQ ID NO: 936 - DNA, 32 bp, Artificial sequence
  Artificial aptamer to MMP9v
gagggttgggggggtgggtacagagcgtgggt

SEQ ID NO: 937 - DNA, 32 bp, Artificial sequence
  Artificial aptamer to IGE
gaggtgggcgggggggtggaatgacagagcgt

SEQ ID NO: 938 - DNA, 32 bp, Artificial sequence
  Artificial aptamer to MMP9v
gaggtgggagggcgggtggatagggagcggga

SEQ ID NO: 939 - DNA, 32 bp, Artificial sequence
  Artificial aptamer to IGE
gaggtgggggggagggtggataaagtggttta

SEQ ID NO: 940 - DNA, 32 bp, Artificial sequence
  Artificial aptamer to IGE
gaggtgggggggagggtggatatagaggttta

SEQ ID NO: 941 - DNA, 32 bp, Artificial sequence
  Artificial aptamer to AFP
gaggtgggtgggagggtggataaagaggttta

SEQ ID NO: 942 - DNA, 32 bp, Artificial sequence
  Artificial aptamer to AFP
gagtagggatgggggggtgggtcaaagagtgt

SEQ ID NO: 943 - DNA, 32 bp, Artificial sequence
  Artificial aptamer to MMP9v
gagtatgggtgggtcgggagggtcagagcgca

SEQ ID NO: 944 - DNA, 32 bp, Artificial sequence
  Artificial aptamer to IGE
gatgagggtgggggggagggcaaaagcgttcg

SEQ ID NO: 945 - DNA, 32 bp, Artificial sequence
  Artificial aptamer to MMP9v
gatgagggtgggtgggcggataaggagggcgt

SEQ ID NO: 946 - DNA, 32 bp, Artificial sequence
  Artificial aptamer to MMP9v
gatgggagggatgggtgggtaggagcgtagat

SEQ ID NO: 947 - DNA, 32 bp, Artificial sequence
  Artificial aptamer to AFP,MMP9v
gatgggggtgggtgggcggataaggagggtgt

SEQ ID NO: 948 - DNA, 32 bp, Artificial sequence
  Artificial aptamer to MMP9v
gatgggggtgggagggcggataaggagggtgt

SEQ ID NO: 949 - DNA, 32 bp, Artificial sequence
  Artificial aptamer to MMP9v
gatgggggtgggcgggcggataaggagggtgt

SEQ ID NO: 950 - DNA, 32 bp, Artificial sequence
  Artificial aptamer to MMP9v
gatgggttgggtgggggggttagagcagagta

SEQ ID NO: 951 - DNA, 32 bp, Artificial sequence
  Artificial aptamer to MMP9v
gatgggtgggtaaatgggtgggatagcgttag

SEQ ID NO: 952 - DNA, 32 bp, Artificial sequence
  Artificial aptamer to MMP9v
gatggtgggtgggtgggtggatctagagggaa

SEQ ID NO: 953 - DNA, 32 bp, Artificial sequence
  Artificial aptamer to AFP
gatgtgggtgggagggtggtaggtagagttta

SEQ ID NO: 954 - DNA, 32 bp, Artificial sequence
  Artificial aptamer to IGE
gatgtgggcgggcgggtggacttgatcgataa

SEQ ID NO: 955 - DNA, 32 bp, Artificial sequence
  Artificial aptamer to AFP
gatgtgggcgggcgggtggacttgatcgatta

SEQ ID NO: 956 - DNA, 32 bp, Artificial sequence
  Artificial aptamer to IGE
gattagggagggagggggggaaaaagcgtaag

SEQ ID NO: 957 - DNA, 32 bp, Artificial sequence
  Artificial aptamer to AFP
gatgtgggtgggcgggtggacttgatcgatta

SEQ ID NO: 958 - DNA, 32 bp, Artificial sequence
  Artificial aptamer to MMP9v
gattagggagggagggggggtaaaagcgcaag

SEQ ID NO: 959 - DNA, 32 bp, Artificial sequence
  Artificial aptamer to IGE,MMP9v
gattagggagggagggggggtaaaagcgtaaa

SEQ ID NO: 960 - DNA, 32 bp, Artificial sequence
  Artificial aptamer to AFP,IGE,MMP9v
gattagggagggagggggggtaaaagcgtaag

SEQ ID NO: 961 - DNA, 32 bp, Artificial sequence
  Artificial aptamer to IGE
gattagggagggagggggggtaaaggcgtaag

SEQ ID NO: 962 - DNA, 32 bp, Artificial sequence
  Artificial aptamer to MMP9v
gattgggggggggggagggtaacaaagcggta

SEQ ID NO: 963 - DNA, 32 bp, Artificial sequence
  Artificial aptamer to AFP
gcaaaggggggggagggagggcaattgcggta

SEQ ID NO: 964 - DNA, 32 bp, Artificial sequence
  Artificial aptamer to MMP9v
gcaagagggggggtgggtggagtgaagagggt

SEQ ID NO: 965 - DNA, 32 bp, Artificial sequence
  Artificial aptamer to MMP9v
gccagtgggtgggggggggaggccagcgagta

SEQ ID NO: 966 - DNA, 32 bp, Artificial sequence
  Artificial aptamer to AFP
gcaggagggagggtgggtggagtgaagagggt

SEQ ID NO: 967 - DNA, 32 bp, Artificial sequence
  Artificial aptamer to MMP9v
gcaggagggggggtgggtggagcgaagagggt

SEQ ID NO: 968 - DNA, 32 bp, Artificial sequence
  Artificial aptamer to MMP9v
gcaggagggggggtgggtggagtgaagagggt

SEQ ID NO: 969 - DNA, 32 bp, Artificial sequence
  Artificial aptamer to MMP9v
gcaggggagggagggtgggttaaatgagcgct

SEQ ID NO: 970 - DNA, 32 bp, Artificial sequence
  Artificial aptamer to MMP9v
gcagtgggggggtgggtggaggtggtgttata

SEQ ID NO: 971 - DNA, 32 bp, Artificial sequence
  Artificial aptamer to MMP9v
gcagtgggtgggagggtggaagggcagggcgt

SEQ ID NO: 972 - DNA, 32 bp, Artificial sequence
  Artificial aptamer to AFP,MMP9v
gcagtgggtgggtggggggagcggaagcttta

SEQ ID NO: 973 - DNA, 32 bp, Artificial sequence
  Artificial aptamer to AFP
gcagtgggtgggcgggaggcgcgagtgcgtta

SEQ ID NO: 974 - DNA, 32 bp, Artificial sequence
  Artificial aptamer to IGE
gcagtgggtgggcgggaggcgtgagtgcgtca

SEQ ID NO: 975 - DNA, 32 bp, Artificial sequence
  Artificial aptamer to MMP9v
gcagtgggtgggcggggggcgcgagtgcgtta

SEQ ID NO: 976 - DNA, 32 bp, Artificial sequence
  Artificial aptamer to IGE
gcgaacttaagtggggggggtgggtggaaaag

SEQ ID NO: 977 - DNA, 32 bp, Artificial sequence
  Artificial aptamer to AFP
gccggcgggtgggaggggggaggctagcgctg

SEQ ID NO: 978 - DNA, 32 bp, Artificial sequence
  Artificial aptamer to AFP
gccggcgggtgggagggtggaggctagcgctg

SEQ ID NO: 979 - DNA, 32 bp, Artificial sequence
  Artificial aptamer to MMP9v
gccggcgggtgggcggggggaggccagcgctg

SEQ ID NO: 980 - DNA, 32 bp, Artificial sequence
  Artificial aptamer to MMP9v
gccgtgggggggtgggtggaggtggtgttata

SEQ ID NO: 981 - DNA, 32 bp, Artificial sequence
  Artificial aptamer to AFP
ggaaaacaaaggagggagggtgggtggattag

SEQ ID NO: 982 - DNA, 32 bp, Artificial sequence
  Artificial aptamer to AFP,MMP9v
ggaaagggggggagggagggtaaaaagagcgg

SEQ ID NO: 983 - DNA, 32 bp, Artificial sequence
  Artificial aptamer to IGE
ggaaagggggggagggagggtagaaagagcgg

SEQ ID NO: 984 - DNA, 32 bp, Artificial sequence
  Artificial aptamer to IGE
ggaaatgggagggagggggggtatagcaggta

SEQ ID NO: 985 - DNA, 32 bp, Artificial sequence
  Artificial aptamer to IGE
ggaagagggagggagggggggttataagagcg

SEQ ID NO: 986 - DNA, 32 bp, Artificial sequence
  Artificial aptamer to MMP9v
ggaagggggggtgggatgggcttgggctaaga

SEQ ID NO: 987 - DNA, 32 bp, Artificial sequence
  Artificial aptamer to MMP9v
gcgggagggtgggtggaagagcgggtaggcga

SEQ ID NO: 988 - DNA, 32 bp, Artificial sequence
  Artificial aptamer to AFP
gcggtgggggggagggtggtgcttgagggaga

SEQ ID NO: 989 - DNA, 32 bp, Artificial sequence
  Artificial aptamer to IGE
gctattgggggggagggagggaaagaagcgtt

SEQ ID NO: 990 - DNA, 32 bp, Artificial sequence
  Artificial aptamer to IGE
gctgggtggtgggtgggaaaagatccgggtta

SEQ ID NO: 991 - DNA, 32 bp, Artificial sequence
  Artificial aptamer to AFP
ggagatcaaaggagggagggtgggtggattag

SEQ ID NO: 992 - DNA, 32 bp, Artificial sequence
  Artificial aptamer to IGE
ggagggagggtgggtggatagagcgaggttag

SEQ ID NO: 993 - DNA, 32 bp, Artificial sequence
  Artificial aptamer to IGE
ggagggggggtgggtggatagagcgaggtaag

SEQ ID NO: 994 - DNA, 32 bp, Artificial sequence
  Artificial aptamer to AFP
ggagggggggtgggtggattggtagcgcgcta

SEQ ID NO: 995 - DNA, 32 bp, Artificial sequence
  Artificial aptamer to AFP
ggagggtgggcgggtggatagagcgaggtaag

SEQ ID NO: 996 - DNA, 32 bp, Artificial sequence
  Artificial aptamer to MMP9v
ggagggtgggtgggtggatagaacgaggtaag

SEQ ID NO: 997 - DNA, 32 bp, Artificial sequence
  Artificial aptamer to AFP
ggagggtgggtgggtggatagagcgaagtaag

SEQ ID NO: 998 - DNA, 32 bp, Artificial sequence
  Artificial aptamer to AFP
ggagggtgggtgggtggatagagcgagataag

SEQ ID NO: 999 - DNA, 32 bp, Artificial sequence
  Artificial aptamer to MMP9v
ggacggagggagggtgggtggagtcgcgaggg

SEQ ID NO: 1000 - DNA, 32 bp, Artificial sequence
  Artificial aptamer to AFP
ggactggagaaacggcgggagggtgggtggag

SEQ ID NO: 1001 - DNA, 32 bp, Artificial sequence
  Artificial aptamer to MMP9v
ggagaaaccatttgggagggcgggctgggggt

SEQ ID NO: 1002 - DNA, 32 bp, Artificial sequence
  Artificial aptamer to IGE
ggactggagaaacggtgggagggggggtggag

SEQ ID NO: 1003 - DNA, 32 bp, Artificial sequence
  Artificial aptamer to MMP9v
ggactggggaaacggcgggagggggggtggag

SEQ ID NO: 1004 - DNA, 32 bp, Artificial sequence
  Artificial aptamer to AFP
ggagaacaaaagagggagggtgggtggattag

SEQ ID NO: 1005 - DNA, 32 bp, Artificial sequence
  Artificial aptamer to IGE
ggagaacaaaagtgggagggtgggtggattag

SEQ ID NO: 1006 - DNA, 32 bp, Artificial sequence
  Artificial aptamer to AFP
ggagaacaaagaagggagggtgggtggattag

SEQ ID NO: 1007 - DNA, 32 bp, Artificial sequence
  Artificial aptamer to AFP
ggagaacaaaggagggagagtgggtggattag

SEQ ID NO: 1008 - DNA, 32 bp, Artificial sequence
  Artificial aptamer to AFP
ggagaacaaaggagggaggatgggtggattag

SEQ ID NO: 1009 - DNA, 32 bp, Artificial sequence
  Artificial aptamer to IGE
ggagaacaaaggagggagggtggctggattag

SEQ ID NO: 1010 - DNA, 32 bp, Artificial sequence
  Artificial aptamer to IGE,MMP9v
ggagaacaaaggagggagggtgggtggattag

SEQ ID NO: 1011 - DNA, 32 bp, Artificial sequence
  Artificial aptamer to AFP
ggagaacaaaggagggagggtgggtagattag

SEQ ID NO: 1012 - DNA, 32 bp, Artificial sequence
  Artificial aptamer to AFP
ggagaacaaaggagggagggtgggtgaattag

SEQ ID NO: 1013 - DNA, 32 bp, Artificial sequence
  Artificial aptamer to AFP
ggagaacaaaggagggagggtgggtggaatag

SEQ ID NO: 1014 - DNA, 32 bp, Artificial sequence
  Artificial aptamer to MMP9v
ggagaacaaaggagggaggtggtggtgattag

SEQ ID NO: 1015 - DNA, 32 bp, Artificial sequence
  Artificial aptamer to AFP
ggagaacaaaggagggagggtgggtggatttg

SEQ ID NO: 1016 - DNA, 32 bp, Artificial sequence
  Artificial aptamer to IGE
ggagaacaaaggagggagggtgggtgggatag

SEQ ID NO: 1017 - DNA, 32 bp, Artificial sequence
  Artificial aptamer to AFP
ggagaacaaaggagggagggtgggtggtttag

SEQ ID NO: 1018 - DNA, 32 bp, Artificial sequence
  Artificial aptamer to AFP
ggagaacaaaggagggagggtgtgtggattag

SEQ ID NO: 1019 - DNA, 32 bp, Artificial sequence
  Artificial aptamer to MMP9v
ggagaacaaaggagggggtgggtggagttgag

SEQ ID NO: 1020 - DNA, 32 bp, Artificial sequence
  Artificial aptamer to AFP
ggagaacaaaggcgggagggtgggtggattag

SEQ ID NO: 1021 - DNA, 32 bp, Artificial sequence
  Artificial aptamer to IGE
ggagaacaatggagggagggtgggtggattaa

SEQ ID NO: 1022 - DNA, 32 bp, Artificial sequence
  Artificial aptamer to AFP
ggagaacaatggagggagggtgggtggattag

SEQ ID NO: 1023 - DNA, 32 bp, Artificial sequence
  Artificial aptamer to MMP9v
ggagaacaagggagggagggagggtggattag

SEQ ID NO: 1024 - DNA, 32 bp, Artificial sequence
  Artificial aptamer to IGE,MMP9v
ggagaacaagggagggagggtgggtggattag

SEQ ID NO: 1025 - DNA, 32 bp, Artificial sequence
  Artificial aptamer to AFP
ggagaacataggagggagggtgggtggattag

SEQ ID NO: 1026 - DNA, 32 bp, Artificial sequence
  Artificial aptamer to AFP
ggagaacataagtgggcgggggggtggaaagg

SEQ ID NO: 1027 - DNA, 32 bp, Artificial sequence
  Artificial aptamer to AFP
ggagaaccaaggagggagggtgggtggattag

SEQ ID NO: 1028 - DNA, 32 bp, Artificial sequence
  Artificial aptamer to IGE
ggagaacatatgtgggcgggggggtggaatgg

SEQ ID NO: 1029 - DNA, 32 bp, Artificial sequence
  Artificial aptamer to AFP
ggagaacatatgtgggcgggtgggtggaaagg

SEQ ID NO: 1030 - DNA, 32 bp, Artificial sequence
  Artificial aptamer to IGE
ggagaacgaaaggagggaggtgggtggattag

SEQ ID NO: 1031 - DNA, 32 bp, Artificial sequence
  Artificial aptamer to IGE
ggagaacgagggagggagggtgggtggattag

SEQ ID NO: 1032 - DNA, 32 bp, Artificial sequence
  Artificial aptamer to AFP
ggagaactaaggagggagggtgggtggattag

SEQ ID NO: 1033 - DNA, 32 bp, Artificial sequence
  Artificial aptamer to IGE
ggagacaaagggagggagggtgggtggattgg

SEQ ID NO: 1034 - DNA, 32 bp, Artificial sequence
  Artificial aptamer to MMP9v
ggagagcgcggagggggcgggtgggtggtgcg

SEQ ID NO: 1035 - DNA, 32 bp, Artificial sequence
  Artificial aptamer to MMP9v
gggagggagggcgggcaaagagagcggtgtag

SEQ ID NO: 1036 - DNA, 32 bp, Artificial sequence
  Artificial aptamer to IGE
gggagggagggggggaaatataatacgtgcaa

SEQ ID NO: 1037 - DNA, 32 bp, Artificial sequence
  Artificial aptamer to IGE
gggagggagggggggcaaaaggttatgatcgg

SEQ ID NO: 1038 - DNA, 32 bp, Artificial sequence
  Artificial aptamer to AFP
gggagggaggggggggcaaaagtcgcgtgcaa

SEQ ID NO: 1039 - DNA, 32 bp, Artificial sequence
  Artificial aptamer to IGE
gggagggaagggtgggcaaggccgtttaggag

SEQ ID NO: 1040 - DNA, 32 bp, Artificial sequence
  Artificial aptamer to IGE
gggagggagggagggcaaagaatcgcgtgaaa

SEQ ID NO: 1041 - DNA, 32 bp, Artificial sequence
  Artificial aptamer to IGE
gggagggagggagggcaaagacgtgaaatgct

SEQ ID NO: 1042 - DNA, 32 bp, Artificial sequence
  Artificial aptamer to IGE
gggagggagggtgggtggatttagtggattta

SEQ ID NO: 1043 - DNA, 32 bp, Artificial sequence
  Artificial aptamer to MMP9v
gggagggcgggggagtatacgagcaattcggg

SEQ ID NO: 1044 - DNA, 32 bp, Artificial sequence
  Artificial aptamer to IGE
gggagggtgggatgggtaagagtgcaatactt

SEQ ID NO: 1045 - DNA, 32 bp, Artificial sequence
  Artificial aptamer to IGE
gggatgggggggtgggatacggttaggcgatg

SEQ ID NO: 1046 - DNA, 32 bp, Artificial sequence
  Artificial aptamer to MMP9v
ggagggtgggtgggtggatagggcgaggtaag

SEQ ID NO: 1047 - DNA, 32 bp, Artificial sequence
  Artificial aptamer to AFP
ggagggtgggtgggtggatagagcgagttaag

SEQ ID NO: 1048 - DNA, 32 bp, Artificial sequence
  Artificial aptamer to AFP
ggagggtgggtgggtggatagagcgatgtaag

SEQ ID NO: 1049 - DNA, 32 bp, Artificial sequence
  Artificial aptamer to IGE
ggagggtgggtgggtggatagagcgatgttag

SEQ ID NO: 1050 - DNA, 32 bp, Artificial sequence
  Artificial aptamer to MMP9v
ggagggtgggtgggtggatagagcggggtaag

SEQ ID NO: 1051 - DNA, 32 bp, Artificial sequence
  Artificial aptamer to AFP
ggagggtgggtgggtggtaaaagagctttcaa

SEQ ID NO: 1052 - DNA, 32 bp, Artificial sequence
  Artificial aptamer to AFP
ggagggtgggtgggtggatgagtgcttatatg

SEQ ID NO: 1053 - DNA, 32 bp, Artificial sequence
  Artificial aptamer to AFP
ggagggtgggtgggtggattgagcgaggtaag

SEQ ID NO: 1054 - DNA, 32 bp, Artificial sequence
  Artificial aptamer to AFP
ggaggtgggagggtgggtggatcggcgctttg

SEQ ID NO: 1055 - DNA, 32 bp, Artificial sequence
  Artificial aptamer to AFP
ggagtacaaaggagggagggtgggtggattag

SEQ ID NO: 1056 - DNA, 32 bp, Artificial sequence
  Artificial aptamer to IGE
ggatagggagggagggagggtagaaagcgtta

SEQ ID NO: 1057 - DNA, 32 bp, Artificial sequence
  Artificial aptamer to MMP9v
ggatgggagggtgggggggttaaacagcgtga

SEQ ID NO: 1058 - DNA, 32 bp, Artificial sequence
  Artificial aptamer to MMP9v
ggattgggggggagggagggaaaaggcgtgga

SEQ ID NO: 1059 - DNA, 32 bp, Artificial sequence
  Artificial aptamer to IGE
ggattagggagggagggagggtaaaaagcgat

SEQ ID NO: 1060 - DNA, 32 bp, Artificial sequence
  Artificial aptamer to MMP9v
ggattaggggagggagggtgggcaagtagcga

SEQ ID NO: 1061 - DNA, 32 bp, Artificial sequence
  Artificial aptamer to AFP
ggccgaatggagaggtgtgggagggtgggcgg

SEQ ID NO: 1062 - DNA, 32 bp, Artificial sequence
  Artificial aptamer to MMP9v
gggggtgggtgggtggcaagagcggcccagga

SEQ ID NO: 1063 - DNA, 32 bp, Artificial sequence
  Artificial aptamer to IGE
gggggtgggtgggtgggtaaaagagctttcaa

SEQ ID NO: 1064 - DNA, 32 bp, Artificial sequence
  Artificial aptamer to IGE
ggggtggattggtgggtgggtcaaagcagtta

SEQ ID NO: 1065 - DNA, 32 bp, Artificial sequence
  Artificial aptamer to MMP9v
ggggaaaaatagtgggagggggggtggaattt

SEQ ID NO: 1066 - DNA, 32 bp, Artificial sequence
  Artificial aptamer to MMP9v
ggggaacaaaggagggagggtgggtggattag

SEQ ID NO: 1067 - DNA, 32 bp, Artificial sequence
  Artificial aptamer to MMP9v
ggggataagggagggtggggcaaaagggttaa

SEQ ID NO: 1068 - DNA, 32 bp, Artificial sequence
  Artificial aptamer to IGE
ggggagggagggggggcaaaagtcgcgtgcaa

SEQ ID NO: 1069 - DNA, 32 bp, Artificial sequence
  Artificial aptamer to MMP9v
gggggagggtgggtggtagagcgtgcactctt

SEQ ID NO: 1070 - DNA, 32 bp, Artificial sequence
  Artificial aptamer to AFP
gggggagggtgggtggtagagcgtgcagtctt

SEQ ID NO: 1071 - DNA, 32 bp, Artificial sequence
  Artificial aptamer to AFP
ggggggcgggtgggtggaggagcagagattcg

SEQ ID NO: 1072 - DNA, 32 bp, Artificial sequence
  Artificial aptamer to IGE
gggggggagggagggataatagcgtttcacag

SEQ ID NO: 1073 - DNA, 32 bp, Artificial sequence
  Artificial aptamer to IGE
gggggggagggagggcaaattaaagacagcgt

SEQ ID NO: 1074 - DNA, 32 bp, Artificial sequence
  Artificial aptamer to IGE
gggggggagggagggcaatagaagagcattgt

SEQ ID NO: 1075 - DNA, 32 bp, Artificial sequence
  Artificial aptamer to IGE
gggggggagggagggcaattaaacagcgtttc

SEQ ID NO: 1076 - DNA, 32 bp, Artificial sequence
  Artificial aptamer to IGE
gggggggagggagggctcaaagagcgtcataa

SEQ ID NO: 1077 - DNA, 32 bp, Artificial sequence
  Artificial aptamer to IGE
gggggggagggagggtaaataaatatagcgga

SEQ ID NO: 1078 - DNA, 32 bp, Artificial sequence
  Artificial aptamer to IGE
gggggggagggagggtggacgttagcgttcaa

SEQ ID NO: 1079 - DNA, 32 bp, Artificial sequence
  Artificial aptamer to IGE
ggggggggtgggagggtggatcggagcattta

SEQ ID NO: 1080 - DNA, 32 bp, Artificial sequence
  Artificial aptamer to IGE
gggggggagggttgggtgagagggattatgaa

SEQ ID NO: 1081 - DNA, 32 bp, Artificial sequence
  Artificial aptamer to MMP9v
ggggggtgggggggtggattgataaaagttaa

SEQ ID NO: 1082 - DNA, 32 bp, Artificial sequence
  Artificial aptamer to AFP,MMP9v
ggggggtgggggggtggattgataaaagttta

SEQ ID NO: 1083 - DNA, 32 bp, Artificial sequence
  Artificial aptamer to IGE
ggggggtgggcgggtggataatgagccgtgaa

SEQ ID NO: 1084 - DNA, 32 bp, Artificial sequence
  Artificial aptamer to AFP,MMP9v
ggggggtgggggggtggattgacaaaagttta

SEQ ID NO: 1085 - DNA, 32 bp, Artificial sequence
  Artificial aptamer to AFP
ggggggtgggtgggcggtaaaagagctttcaa

SEQ ID NO: 1086 - DNA, 32 bp, Artificial sequence
  Artificial aptamer to MMP9v
ggggggtgggggggtggattgataaaagtttg

SEQ ID NO: 1087 - DNA, 32 bp, Artificial sequence
  Artificial aptamer to IGE
ggggggtgggggggtggattgataaaggttta

SEQ ID NO: 1088 - DNA, 32 bp, Artificial sequence
  Artificial aptamer to MMP9v
ggggggtgggggggtggattgataagagttta

SEQ ID NO: 1089 - DNA, 32 bp, Artificial sequence
  Artificial aptamer to MMP9v
ggggggtgggggggtggattgataatagttta

SEQ ID NO: 1090 - DNA, 32 bp, Artificial sequence
  Artificial aptamer to MMP9v
ggggggtgggggggtggattggtaaaagttta

SEQ ID NO: 1091 - DNA, 32 bp, Artificial sequence
  Artificial aptamer to AFP
ggggggtgggtgggtggaggagcagagattcg

SEQ ID NO: 1092 - DNA, 32 bp, Artificial sequence
  Artificial aptamer to AFP
ggggggtgggtgggtggtaaaagagctttcga

SEQ ID NO: 1093 - DNA, 32 bp, Artificial sequence
  Artificial aptamer to AFP
ggggggtgggtgggtggtaaaagagctttcta

SEQ ID NO: 1094 - DNA, 32 bp, Artificial sequence
  Artificial aptamer to AFP
ggggggtgggtgggtggtaaaagagcttttaa

SEQ ID NO: 1095 - DNA, 32 bp, Artificial sequence
  Artificial aptamer to AFP
ggggggtgggtgggtggtaaaggagctttcaa

SEQ ID NO: 1096 - DNA, 32 bp, Artificial sequence
  Artificial aptamer to AFP
ggggggtgggtgggtggtaaatgagctttcaa

SEQ ID NO: 1097 - DNA, 32 bp, Artificial sequence
  Artificial aptamer to AFP
ggggggtgggtgggtggtaagagagctttcaa

SEQ ID NO: 1098 - DNA, 32 bp, Artificial sequence
  Artificial aptamer to AFP
ggggggtgggtgggtggtaatagagctttcaa

SEQ ID NO: 1099 - DNA, 32 bp, Artificial sequence
  Artificial aptamer to AFP
ggggggtgggtgggtggtataagagctttcaa

SEQ ID NO: 1100 - DNA, 32 bp, Artificial sequence
  Artificial aptamer to AFP
ggtgaacaaaggagggagggtgggtggattag

SEQ ID NO: 1101 - DNA, 32 bp, Artificial sequence
  Artificial aptamer to IGE
gggtgagtagggtgggtggagggggagcatta

SEQ ID NO: 1102 - DNA, 32 bp, Artificial sequence
  Artificial aptamer to IGE
gggtgggagggagggtatgcgtatattacagg

SEQ ID NO: 1103 - DNA, 32 bp, Artificial sequence
  Artificial aptamer to AFP
gggtgggagggggggcataaacagcgggttca

SEQ ID NO: 1104 - DNA, 32 bp, Artificial sequence
  Artificial aptamer to IGE
gggtgggagggtgggtggtataagaagcggaa

SEQ ID NO: 1105 - DNA, 32 bp, Artificial sequence
  Artificial aptamer to IGE
gggtgggaaatagggtgggaaaagcgtaaagg

SEQ ID NO: 1106 - DNA, 32 bp, Artificial sequence
  Artificial aptamer to IGE
gggtgggtgggtataaaaacaattgccgagtg

SEQ ID NO: 1107 - DNA, 32 bp, Artificial sequence
  Artificial aptamer to IGE
ggtattacgggagggagggggggcaaaagcgt

SEQ ID NO: 1108 - DNA, 32 bp, Artificial sequence
  Artificial aptamer to IGE,MMP9v
gtagaggggagggagggggggtaatagcggat

SEQ ID NO: 1109 - DNA, 32 bp, Artificial sequence
  Artificial aptamer to AFP
gtagatgggagggagggggggtcctacgttta

SEQ ID NO: 1110 - DNA, 32 bp, Artificial sequence
  Artificial aptamer to MMP9v
ggtgggatgggctgggtgggtttgtagcgcgt

SEQ ID NO: 1111 - DNA, 32 bp, Artificial sequence
  Artificial aptamer to MMP9v
ggtgggagggtgggtggattaagcgggttgat

SEQ ID NO: 1112 - DNA, 32 bp, Artificial sequence
  Artificial aptamer to AFP
ggtgggcgggtgggtggaattgagcggaataa

SEQ ID NO: 1113 - DNA, 32 bp, Artificial sequence
  Artificial aptamer to MMP9v
ggtgggggggtgggcggatcaagcgggttgat

SEQ ID NO: 1114 - DNA, 32 bp, Artificial sequence
  Artificial aptamer to MMP9v
ggtgggggggtgggcggattaagcgggttgat

SEQ ID NO: 1115 - DNA, 32 bp, Artificial sequence
  Artificial aptamer to MMP9v
ggtgggggggtgggtggattaagcgggttgat

SEQ ID NO: 1116 - DNA, 32 bp, Artificial sequence
  Artificial aptamer to MMP9v
ggtgggggggtgggtggattaagcgggttggt

SEQ ID NO: 1117 - DNA, 32 bp, Artificial sequence
  Artificial aptamer to MMP9v
ggtgggggggtgggtggattaagcgggtcgat

SEQ ID NO: 1118 - DNA, 32 bp, Artificial sequence
  Artificial aptamer to IGE
ggtggggggtgggtggattgaagcgggttgat

SEQ ID NO: 1119 - DNA, 32 bp, Artificial sequence
  Artificial aptamer to AFP
ggtgggggggtgggtggattaagcgtgttgat

SEQ ID NO: 1120 - DNA, 32 bp, Artificial sequence
  Artificial aptamer to MMP9v
ggtgggggggtgggtggattaagtgggttgat

SEQ ID NO: 1121 - DNA, 32 bp, Artificial sequence
  Artificial aptamer to MMP9v
ggtgggggggtgggtggattgagcgggttgct

SEQ ID NO: 1122 - DNA, 32 bp, Artificial sequence
  Artificial aptamer to AFP
ggtgggggggtgggtggatttagcgggttgat

SEQ ID NO: 1123 - DNA, 32 bp, Artificial sequence
  Artificial aptamer to AFP
ggtgggggggtgggtggtaggagtcaaattct

SEQ ID NO: 1124 - DNA, 32 bp, Artificial sequence
  Artificial aptamer to AFP,MMP9v
ggtgggtgggaggggggattgagcgggtagaa

SEQ ID NO: 1125 - DNA, 32 bp, Artificial sequence
  Artificial aptamer to AFP
ggtgggtgggcgggaggattacagcgttaagg

SEQ ID NO: 1126 - DNA, 32 bp, Artificial sequence
  Artificial aptamer to IGE
ggtgggtgggcgggaggattatagcgttaagg

SEQ ID NO: 1127 - DNA, 32 bp, Artificial sequence
  Artificial aptamer to AFP
ggtgggtgggggggtggattaagcgcaaaagt

SEQ ID NO: 1128 - DNA, 32 bp, Artificial sequence
  Artificial aptamer to IGE
ggtgggtggggttgggtggattgggcggatcg

SEQ ID NO: 1129 - DNA, 32 bp, Artificial sequence
  Artificial aptamer to IGE
ggtgggtgggtaagaagggtggagggcgttgt

SEQ ID NO: 1130 - DNA, 32 bp, Artificial sequence
  Artificial aptamer to AFP
ggtgggtgggtgggtggatagagcgaggtaag

SEQ ID NO: 1131 - DNA, 32 bp, Artificial sequence
  Artificial aptamer to AFP
ggtgggtgggtgggtggtaaaagagctttcaa

SEQ ID NO: 1132 - DNA, 32 bp, Artificial sequence
  Artificial aptamer to IGE
gtaagggttgggggggagggaaggtgtgttta

SEQ ID NO: 1133 - DNA, 32 bp, Artificial sequence
  Artificial aptamer to MMP9v
gtaagggtgggggggatgggctcagcgttcca

SEQ ID NO: 1134 - DNA, 32 bp, Artificial sequence
  Artificial aptamer to AFP
gtcgaaacagagtgggcgggcgggtggtaagt

SEQ ID NO: 1135 - DNA, 32 bp, Artificial sequence
  Artificial aptamer to AFP
gtcgaagggcggtgggtgggggggtggtgcaa

SEQ ID NO: 1136 - DNA, 32 bp, Artificial sequence
  Artificial aptamer to IGE
gtagggagggagggggggttagggttattcgc

SEQ ID NO: 1137 - DNA, 32 bp, Artificial sequence
  Artificial aptamer to IGE
gtagggaggtagtgggtgggaaaatgtgttta

SEQ ID NO: 1138 - DNA, 32 bp, Artificial sequence
  Artificial aptamer to AFP
gtagggggtgggagggtggatcggagcattta

SEQ ID NO: 1139 - DNA, 32 bp, Artificial sequence
  Artificial aptamer to AFP
gtagggggggagggagggcaaaagcgtagaaa

SEQ ID NO: 1140 - DNA, 32 bp, Artificial sequence
  Artificial aptamer to IGE
gtagggggggagggagggtaaaagcgtagaaa

SEQ ID NO: 1141 - DNA, 32 bp, Artificial sequence
  Artificial aptamer to MMP9v
gtagggggggtgggtagggtaagcgtgaaatg

SEQ ID NO: 1142 - DNA, 32 bp, Artificial sequence
  Artificial aptamer to IGE
gtaggggggtgggatgggtggaaacgagcata

SEQ ID NO: 1143 - DNA, 32 bp, Artificial sequence
  Artificial aptamer to AFP,MMP9v
gtagggtgggggggtagggataaagcggacaa

SEQ ID NO: 1144 - DNA, 32 bp, Artificial sequence
  Artificial aptamer to IGE
gtagggtggtctgcgggcgggtaagggcgtgt

SEQ ID NO: 1145 - DNA, 32 bp, Artificial sequence
  Artificial aptamer to IGE
gtagtagggagggagggggggtcagagcgtat

SEQ ID NO: 1146 - DNA, 32 bp, Artificial sequence
  Artificial aptamer to IGE
gtagtgggtgggtgggtggatagtgtgtgtga

SEQ ID NO: 1147 - DNA, 32 bp, Artificial sequence
  Artificial aptamer to IGE
gtatgggggggtgggatgggtcttgacggaaa

SEQ ID NO: 1148 - DNA, 32 bp, Artificial sequence
  Artificial aptamer to IGE
gtattatcgggagggagggggggtaggcgtta

SEQ ID NO: 1149 - DNA, 32 bp, Artificial sequence
  Artificial aptamer to AFP
gtgggagggtgggtggaaaagagtttagcccg

SEQ ID NO: 1150 - DNA, 32 bp, Artificial sequence
  Artificial aptamer to MMP9v
gtgggagggtgggtggaagagcgggtaggcga

SEQ ID NO: 1151 - DNA, 32 bp, Artificial sequence
  Artificial aptamer to IGE
gtgggagggtgggtggtggtgcgtaaatgata

SEQ ID NO: 1152 - DNA, 32 bp, Artificial sequence
  Artificial aptamer to MMP9v
gtgggaggtgggagggtggatcggagcattta

SEQ ID NO: 1153 - DNA, 32 bp, Artificial sequence
  Artificial aptamer to AFP,MMP9v
gtgggagggtgggtggaggagggtcttattag

SEQ ID NO: 1154 - DNA, 32 bp, Artificial sequence
  Artificial aptamer to AFP
gtgggagggtgggtggtagagcgtgcagtctt

SEQ ID NO: 1155 - DNA, 32 bp, Artificial sequence
  Artificial aptamer to MMP9v
gtgggagggtgggtggtagatagcgttgaaca

SEQ ID NO: 1156 - DNA, 32 bp, Artificial sequence
  Artificial aptamer to IGE
gtgggagtgggcgggtggtacaagaggcgtga

SEQ ID NO: 1157 - DNA, 32 bp, Artificial sequence
  Artificial aptamer to MMP9v
gtgggatgggggggtgggtatagtgtttatga

SEQ ID NO: 1158 - DNA, 32 bp, Artificial sequence
  Artificial aptamer to MMP9v
gtgggcgggagggtggaggagcatgaagtatg

SEQ ID NO: 1159 - DNA, 32 bp, Artificial sequence
  Artificial aptamer to MMP9v
gtgggcgggtgggtggaggagcgggaagtatg

SEQ ID NO: 1160 - DNA, 32 bp, Artificial sequence
  Artificial aptamer to AFP
gtgggcgggtgggtggtaggagcgattgcacg

SEQ ID NO: 1161 - DNA, 32 bp, Artificial sequence
  Artificial aptamer to AFP
gtcgtatggaggagggtgggggggtggataca

SEQ ID NO: 1162 - DNA, 32 bp, Artificial sequence
  Artificial aptamer to IGE
gtgaggggtgggagggtggatcggagcattta

SEQ ID NO: 1163 - DNA, 32 bp, Artificial sequence
  Artificial aptamer to IGE
gtgagggtgggtgggtggtaagaggagctaaa

SEQ ID NO: 1164 - DNA, 32 bp, Artificial sequence
  Artificial aptamer to IGE
gtgagggtgggtgggtggacaatgcgtattcg

SEQ ID NO: 1165 - DNA, 32 bp, Artificial sequence
  Artificial aptamer to AFP
gtgagggtgggtgggtggatgagcgagtttca

SEQ ID NO: 1166 - DNA, 32 bp, Artificial sequence
  Artificial aptamer to AFP
gtgagtcgaatgagatgtgggtgggtgggtgg

SEQ ID NO: 1167 - DNA, 32 bp, Artificial sequence
  Artificial aptamer to IGE
gtggatgagggtgggtgggggggctgagcgta

SEQ ID NO: 1168 - DNA, 32 bp, Artificial sequence
  Artificial aptamer to IGE
gtggatgaggtgggcgggaggggctgagcgta

SEQ ID NO: 1169 - DNA, 32 bp, Artificial sequence
  Artificial aptamer to AFP
gtgggtgggtgggtggcaaagggcaagtgata

SEQ ID NO: 1170 - DNA, 32 bp, Artificial sequence
  Artificial aptamer to MMP9v
gtgggtgggtgggtggagaggggttaagtgtg

SEQ ID NO: 1171 - DNA, 32 bp, Artificial sequence
  Artificial aptamer to IGE
gtgggtgggtgggtggcatgcgtttggtcaat

SEQ ID NO: 1172 - DNA, 32 bp, Artificial sequence
  Artificial aptamer to MMP9v
gtgggtgggtgggtggcaaagggcaattgata

SEQ ID NO: 1173 - DNA, 32 bp, Artificial sequence
  Artificial aptamer to AFP
gtgggtgggtgggtggtaagagtgattatgag

SEQ ID NO: 1174 - DNA, 32 bp, Artificial sequence
  Artificial aptamer to MMP9v
gtgggtgggtgggtggcgggcgtatgcaggtc

SEQ ID NO: 1175 - DNA, 32 bp, Artificial sequence
  Artificial aptamer to AFP
gtgggtgggtgggtggctttaaaatgcgggaa

SEQ ID NO: 1176 - DNA, 32 bp, Artificial sequence
  Artificial aptamer to IGE
gtgggtgggtgggtggtgggcgtatgcaggtc

SEQ ID NO: 1177 - DNA, 32 bp, Artificial sequence
  Artificial aptamer to AFP
gtgggtgggtgggtggtggacgcagtatattt

SEQ ID NO: 1178 - DNA, 32 bp, Artificial sequence
  Artificial aptamer to IGE
gtgggtgtgtgggaggtaagagtgattatgag

SEQ ID NO: 1179 - DNA, 32 bp, Artificial sequence
  Artificial aptamer to AFP
gtggtgggggggagggtggtgcttgaaggaga

SEQ ID NO: 1180 - DNA, 32 bp, Artificial sequence
  Artificial aptamer to AFP
gtggtgggtgggagggtggatcggagcattta

SEQ ID NO: 1181 - DNA, 32 bp, Artificial sequence
  Artificial aptamer to IGE
gtggtgggtgggtggcgcggaaggcagagtgg

SEQ ID NO: 1182 - DNA, 32 bp, Artificial sequence
  Artificial aptamer to AFP
gtggggagtgggagggtggatcggagcattta

SEQ ID NO: 1183 - DNA, 32 bp, Artificial sequence
  Artificial aptamer to AFP
gtggggggagggtgggtggaacgaagatgtga

SEQ ID NO: 1184 - DNA, 32 bp, Artificial sequence
  Artificial aptamer to IGE
gtgggggggtgggaggtaagagtgattatgag

SEQ ID NO: 1185 - DNA, 32 bp, Artificial sequence
  Artificial aptamer to AFP
gtgggggggtgggtggtagagcgtgataggag

SEQ ID NO: 1186 - DNA, 32 bp, Artificial sequence
  Artificial aptamer to AFP
gtgggggggtgggtggtatcagagcgtgaaca

SEQ ID NO: 1187 - DNA, 32 bp, Artificial sequence
  Artificial aptamer to IGE
gtgggggggtgggtggtgagcggtttcgtgga

SEQ ID NO: 1188 - DNA, 32 bp, Artificial sequence
  Artificial aptamer to AFP,MMP9v
gtggggggtgggagggtggatcggagcactta

SEQ ID NO: 1189 - DNA, 32 bp, Artificial sequence
  Artificial aptamer to AFP
gtggggggtgggagggtggatcagagcattta

SEQ ID NO: 1190 - DNA, 32 bp, Artificial sequence
  Artificial aptamer to AFP
gtggggggtgggagggtggatcgtagcattta

SEQ ID NO: 1191 - DNA, 32 bp, Artificial sequence
  Artificial aptamer to AFP
gtggggggtgggagggtggattggagcattta

SEQ ID NO: 1192 - DNA, 32 bp, Artificial sequence
  Artificial aptamer to IGE
gtggggggtgggagggtggatcggagcattag

SEQ ID NO: 1193 - DNA, 32 bp, Artificial sequence
  Artificial aptamer to IGE
gtggggggtgggagggtggatcggagcatttc

SEQ ID NO: 1194 - DNA, 32 bp, Artificial sequence
  Artificial aptamer to AFP
gtggggggtgggagggtggatcggagcatttg

SEQ ID NO: 1195 - DNA, 32 bp, Artificial sequence
  Artificial aptamer to AFP
gtggggggtgggagggtggatcggagcgttta

SEQ ID NO: 1196 - DNA, 32 bp, Artificial sequence
  Artificial aptamer to AFP
gtggggggtgggagggtggatcggagctttta

SEQ ID NO: 1197 - DNA, 32 bp, Artificial sequence
  Artificial aptamer to AFP
gtggggggtgggagggtggatcggagtattta

SEQ ID NO: 1198 - DNA, 32 bp, Artificial sequence
  Artificial aptamer to AFP
gtggggggtgggagggtggatcggtgcattta

SEQ ID NO: 1199 - DNA, 32 bp, Artificial sequence
  Artificial aptamer to MMP9v
gtggggggtgggggggtggatcggaacattta

SEQ ID NO: 1200 - DNA, 32 bp, Artificial sequence
  Artificial aptamer to AFP
gtggggggtgggggggtggatcggagcattta

SEQ ID NO: 1201 - DNA, 32 bp, Artificial sequence
  Artificial aptamer to AFP
gtgggggtgggcgggtggattatgaggagtta

SEQ ID NO: 1202 - DNA, 32 bp, Artificial sequence
  Artificial aptamer to MMP9v
gtgggggtgggagggtggatcgggagcattta

SEQ ID NO: 1203 - DNA, 32 bp, Artificial sequence
  Artificial aptamer to MMP9v
gtgggggtgggcgggtggtgcaagaggcgtga

SEQ ID NO: 1204 - DNA, 32 bp, Artificial sequence
  Artificial aptamer to AFP
gtgggggtgggcgggtggtaattgaaggtata

SEQ ID NO: 1205 - DNA, 32 bp, Artificial sequence
  Artificial aptamer to MMP9v
gtgggggtgggcgggtggtacgagaggcgtga

SEQ ID NO: 1206 - DNA, 32 bp, Artificial sequence
  Artificial aptamer to AFP
gtgggggtgggtgggtggtaattgaaagtata

SEQ ID NO: 1207 - DNA, 32 bp, Artificial sequence
  Artificial aptamer to AFP
gtgggggtgggtgggtggtaattgaaggtata

SEQ ID NO: 1208 - DNA, 32 bp, Artificial sequence
  Artificial aptamer to IGE
gtggggtgggtgggtggaagagcgtcacatat

SEQ ID NO: 1209 - DNA, 32 bp, Artificial sequence
  Artificial aptamer to IGE
gtggggtgggtgggtggtaaaagagcttacaa

SEQ ID NO: 1210 - DNA, 32 bp, Artificial sequence
  Artificial aptamer to MMP9v
gtgggtgggagggtggaggagcgggaagtatg

SEQ ID NO: 1211 - DNA, 32 bp, Artificial sequence
  Artificial aptamer to MMP9v
gtgggtgggagggtggaggagcgtggggtctt

SEQ ID NO: 1212 - DNA, 32 bp, Artificial sequence
  Artificial aptamer to AFP
gtgggtgggcgggtggataatgagagttaata

SEQ ID NO: 1213 - DNA, 32 bp, Artificial sequence
  Artificial aptamer to IGE
gtgggtgggcgggtggcagaagcgtgcatgag

SEQ ID NO: 1214 - DNA, 32 bp, Artificial sequence
  Artificial aptamer to AFP
gtgggtgggggggtggaagtagcggttaggaa

SEQ ID NO: 1215 - DNA, 32 bp, Artificial sequence
  Artificial aptamer to AFP
gtgggtgggggggtggttagagagcgtattaa

SEQ ID NO: 1216 - DNA, 32 bp, Artificial sequence
  Artificial aptamer to IGE
gtgggtgggtgggaggaaagagtgattatgag

SEQ ID NO: 1217 - DNA, 32 bp, Artificial sequence
  Artificial aptamer to IGE
gtgggtgggtaatgggtgggttcggcgtaaag

SEQ ID NO: 1218 - DNA, 32 bp, Artificial sequence
  Artificial aptamer to IGE
gtgggtgggtgggaggtaagagtgattataag

SEQ ID NO: 1219 - DNA, 32 bp, Artificial sequence
  Artificial aptamer to IGE
gtgggtgggtgggaggtaagagtgattatgcg

SEQ ID NO: 1220 - DNA, 32 bp, Artificial sequence
  Artificial aptamer to AFP
gtgggtgggtgggaggtatgagtgattatgag

SEQ ID NO: 1221 - DNA, 32 bp, Artificial sequence
  Artificial aptamer to AFP
gtgggtgggtggggggaaagagcgcgttgatt

SEQ ID NO: 1222 - DNA, 32 bp, Artificial sequence
  Artificial aptamer to AFP
taacggagggtgggtggggggagtcatgagcg

SEQ ID NO: 1223 - DNA, 32 bp, Artificial sequence
  Artificial aptamer to IGE
taagggagggagggggggtaagatcagcgtta

SEQ ID NO: 1224 - DNA, 32 bp, Artificial sequence
  Artificial aptamer to AFP
taaggggggagggtgggtggaatattggctaa

SEQ ID NO: 1225 - DNA, 32 bp, Artificial sequence
  Artificial aptamer to IGE
taagggggggagggagggcaggagcgtcttac

SEQ ID NO: 1226 - DNA, 32 bp, Artificial sequence
  Artificial aptamer to MMP9v
taagggggggagggagggtaatcaaacgttta

SEQ ID NO: 1227 - DNA, 32 bp, Artificial sequence
  Artificial aptamer to IGE
taagggggggagggagggtagtcaaacgttta

SEQ ID NO: 1228 - DNA, 32 bp, Artificial sequence
  Artificial aptamer to IGE
taagggggtggtgtgggtggggatctagttta

SEQ ID NO: 1229 - DNA, 32 bp, Artificial sequence
  Artificial aptamer to AFP
taaggggtgggggggagggctgtggcgtacaa

SEQ ID NO: 1230 - DNA, 32 bp, Artificial sequence
  Artificial aptamer to MMP9v
taagggtgggggggagggcaagagcgacacga

SEQ ID NO: 1231 - DNA, 32 bp, Artificial sequence
  Artificial aptamer to IGE
taagggtggtagtgggggggattctaggttta

SEQ ID NO: 1232 - DNA, 32 bp, Artificial sequence
  Artificial aptamer to AFP
gtgtcgaacgatgtgggagggcgggtggaaag

SEQ ID NO: 1233 - DNA, 32 bp, Artificial sequence
  Artificial aptamer to IGE
gtgtgggcgggtgggtggaaggagacgcgtta

SEQ ID NO: 1234 - DNA, 32 bp, Artificial sequence
  Artificial aptamer to AFP
gtgtgggagggtgggtggatgagcgagtttca

SEQ ID NO: 1235 - DNA, 32 bp, Artificial sequence
  Artificial aptamer to AFP,MMP9v
gtgtgggagggttgggtggaaagagcgggaaa

SEQ ID NO: 1236 - DNA, 32 bp, Artificial sequence
  Artificial aptamer to IGE
gtgtgggagggttgggtggaaagagcgggaag

SEQ ID NO: 1237 - DNA, 32 bp, Artificial sequence
  Artificial aptamer to IGE
gtgtgggcgggtgggtggaaggggacgcttta

SEQ ID NO: 1238 - DNA, 32 bp, Artificial sequence
  Artificial aptamer to MMP9v
gtgtgggtgggagggtggaatagagcgggtag

SEQ ID NO: 1239 - DNA, 32 bp, Artificial sequence
  Artificial aptamer to IGE
gtgtgggtgggtgggtggaaaggagagttgaa

SEQ ID NO: 1240 - DNA, 32 bp, Artificial sequence
  Artificial aptamer to AFP
gtgtgggtgggtgggtggatgagcgagtttcg

SEQ ID NO: 1241 - DNA, 32 bp, Artificial sequence
  Artificial aptamer to IGE
gtgtgggtgggtgggtggatgagcgagtttct

SEQ ID NO: 1242 - DNA, 32 bp, Artificial sequence
  Artificial aptamer to MMP9v
gtgtgggtgggtgggtggatgagcgggtttca

SEQ ID NO: 1243 - DNA, 32 bp, Artificial sequence
  Artificial aptamer to MMP9v
gtgtgggtgggtgggtggttattgaaggtata

SEQ ID NO: 1244 - DNA, 32 bp, Artificial sequence
  Artificial aptamer to IGE
gtgtggtgggtgggtggatagagcgaggtaaa

SEQ ID NO: 1245 - DNA, 32 bp, Artificial sequence
  Artificial aptamer to IGE
gttaaagggggggagggagggcaaaagcgcaa

SEQ ID NO: 1246 - DNA, 32 bp, Artificial sequence
  Artificial aptamer to MMP9v
gttaaagggggggatgggtgggtcagcgttca

SEQ ID NO: 1247 - DNA, 32 bp, Artificial sequence
  Artificial aptamer to IGE
gttatagggagggagggggggtgtttcgttta

SEQ ID NO: 1248 - DNA, 32 bp, Artificial sequence
  Artificial aptamer to IGE
gttcataaagggtgggggggagggcaagagcg

SEQ ID NO: 1249 - DNA, 32 bp, Artificial sequence
  Artificial aptamer to IGE
taaaagggggggagggagggcagaaggcgtgg

SEQ ID NO: 1250 - DNA, 32 bp, Artificial sequence
  Artificial aptamer to MMP9v
gtttgggaagggtgggggggataagagtttag

SEQ ID NO: 1251 - DNA, 32 bp, Artificial sequence
  Artificial aptamer to MMP9v
taaagggagggagggtgggcagaaagcggcag

SEQ ID NO: 1252 - DNA, 32 bp, Artificial sequence
  Artificial aptamer to AFP,IGE
taaagggggggagggagggcaggagcgcctta

SEQ ID NO: 1253 - DNA, 32 bp, Artificial sequence
  Artificial aptamer to IGE
taaagggggggagggagggcaggagcgtctta

SEQ ID NO: 1254 - DNA, 32 bp, Artificial sequence
  Artificial aptamer to AFP
taaagggggggagggagggtaggagcgcctta

SEQ ID NO: 1255 - DNA, 32 bp, Artificial sequence
  Artificial aptamer to AFP
taaagggggggagggggggcaaacgcgttgta

SEQ ID NO: 1256 - DNA, 32 bp, Artificial sequence
  Artificial aptamer to MMP9v
taaaggggggggagggagggaggagcgcctta

SEQ ID NO: 1257 - DNA, 32 bp, Artificial sequence
  Artificial aptamer to IGE
tacgagggtgggggggtggaaaaagagcaaaa

SEQ ID NO: 1258 - DNA, 32 bp, Artificial sequence
  Artificial aptamer to IGE
taagtggggagggtgggagggtctagcgggga

SEQ ID NO: 1259 - DNA, 32 bp, Artificial sequence
  Artificial aptamer to MMP9v
taagtgggtgggtgggcggagatgggagcggg

SEQ ID NO: 1260 - DNA, 32 bp, Artificial sequence
  Artificial aptamer to IGE
taatagggagggagggggggaaaagaagtgaa

SEQ ID NO: 1261 - DNA, 32 bp, Artificial sequence
  Artificial aptamer to IGE
taatgggtgggacgggagggcggaagcgtgga

SEQ ID NO: 1262 - DNA, 32 bp, Artificial sequence
  Artificial aptamer to IGE
taattggggggggagggaggggtaagcgcgca

SEQ ID NO: 1263 - DNA, 32 bp, Artificial sequence
  Artificial aptamer to MMP9v
taattgggtagggatgggtgggtaaagcgtta

SEQ ID NO: 1264 - DNA, 32 bp, Artificial sequence
  Artificial aptamer to IGE
tacagggggggagggtgggcataggcgttcgg

SEQ ID NO: 1265 - DNA, 32 bp, Artificial sequence
  Artificial aptamer to IGE
tacagggggggagggtgggcgagagcgtagga

SEQ ID NO: 1266 - DNA, 32 bp, Artificial sequence
  Artificial aptamer to IGE
tacatagggagggcgggggggcaagaagtttg

SEQ ID NO: 1267 - DNA, 32 bp, Artificial sequence
  Artificial aptamer to IGE
tacatagggagggtgggggggccaagcgttac

SEQ ID NO: 1268 - DNA, 32 bp, Artificial sequence
  Artificial aptamer to MMP9v
taggagaagtcggtgcgggggtgggaggagac

SEQ ID NO: 1269 - DNA, 32 bp, Artificial sequence
  Artificial aptamer to MMP9v
taggagaagtcggtgggggggagggaggagac

SEQ ID NO: 1270 - DNA, 32 bp, Artificial sequence
  Artificial aptamer to MMP9v
taggagaagtcggtgggggggtgggaggagac

SEQ ID NO: 1271 - DNA, 32 bp, Artificial sequence
  Artificial aptamer to AFP,MMP9v
taggccggggggtgggtgggtggtggcctgag

SEQ ID NO: 1272 - DNA, 32 bp, Artificial sequence
  Artificial aptamer to IGE
tagggagggagggtgggcaggaggttatcgcg

SEQ ID NO: 1273 - DNA, 32 bp, Artificial sequence
  Artificial aptamer to IGE
tagggagggagggtgggcaggtaaacgcgtat

SEQ ID NO: 1274 - DNA, 32 bp, Artificial sequence
  Artificial aptamer to IGE
tagggagggggggagggcaaagcgtacaggat

SEQ ID NO: 1275 - DNA, 32 bp, Artificial sequence
  Artificial aptamer to IGE
tagggagggggggcgggcataaaaagagtgca

SEQ ID NO: 1276 - DNA, 32 bp, Artificial sequence
  Artificial aptamer to IGE
tagggagggggggtgggtagagcgaaagggta

SEQ ID NO: 1277 - DNA, 32 bp, Artificial sequence
  Artificial aptamer to IGE
tagggagggggggttgggatagaaaatagcgg

SEQ ID NO: 1278 - DNA, 32 bp, Artificial sequence
  Artificial aptamer to IGE
tagggagggtcgggtgggtaacggtgtggccg

SEQ ID NO: 1279 - DNA, 32 bp, Artificial sequence
  Artificial aptamer to IGE
tagggagggtgggtcgggtagagcgtgcatcg

SEQ ID NO: 1280 - DNA, 32 bp, Artificial sequence
  Artificial aptamer to IGE
tacggagggagggtgggtggtagttttgaacg

SEQ ID NO: 1281 - DNA, 32 bp, Artificial sequence
  Artificial aptamer to MMP9v
tacggggggtgggggggtggaggtttgagtag

SEQ ID NO: 1282 - DNA, 32 bp, Artificial sequence
  Artificial aptamer to IGE
tacgggtgggagggtgggtggtagtttgaacg

SEQ ID NO: 1283 - DNA, 32 bp, Artificial sequence
  Artificial aptamer to IGE
tacggtgggagggtgggtggtagttttgtacg

SEQ ID NO: 1284 - DNA, 32 bp, Artificial sequence
  Artificial aptamer to AFP
tacggtgggagggtgggtggtagtcttgaacg

SEQ ID NO: 1285 - DNA, 32 bp, Artificial sequence
  Artificial aptamer to AFP
tacggtgggagggtgggtggtggttttgaacg

SEQ ID NO: 1286 - DNA, 32 bp, Artificial sequence
  Artificial aptamer to AFP
tacggtgggggggtgggtggtagttttgaacg

SEQ ID NO: 1287 - DNA, 32 bp, Artificial sequence
  Artificial aptamer to IGE
tagaggggagggagggcgggcaaggagcgtca

SEQ ID NO: 1288 - DNA, 32 bp, Artificial sequence
  Artificial aptamer to IGE
tagtgggagggggggtggaaggagcgtgataa

SEQ ID NO: 1289 - DNA, 32 bp, Artificial sequence
  Artificial aptamer to AFP
tagtgggagggtgggtggaaaggaagccgttt

SEQ ID NO: 1290 - DNA, 32 bp, Artificial sequence
  Artificial aptamer to MMP9v
tagtgggtgggagggtggaagtagagcgtata

SEQ ID NO: 1291 - DNA, 32 bp, Artificial sequence
  Artificial aptamer to MMP9v
tagtgggtgggagggtggaatagagcgggtag

SEQ ID NO: 1292 - DNA, 32 bp, Artificial sequence
  Artificial aptamer to IGE
tagtgggtgggcgggcggagagagcggaaaga

SEQ ID NO: 1293 - DNA, 32 bp, Artificial sequence
  Artificial aptamer to MMP9v
tagtgggtggggggggggaaggagcgtgataa

SEQ ID NO: 1294 - DNA, 32 bp, Artificial sequence
  Artificial aptamer to MMP9v
tagtgggtgggggggtggaaagtggggtttat

SEQ ID NO: 1295 - DNA, 32 bp, Artificial sequence
  Artificial aptamer to AFP
tagtgggtgggggggtggaaggagcgcgataa

SEQ ID NO: 1296 - DNA, 32 bp, Artificial sequence
  Artificial aptamer to AFP,MMP9v
tagtgggtgggggggtggaaggtggggtttat

SEQ ID NO: 1297 - DNA, 32 bp, Artificial sequence
  Artificial aptamer to AFP
tagtgggtgggggggtggaaggagcgtgatta

SEQ ID NO: 1298 - DNA, 32 bp, Artificial sequence
  Artificial aptamer to AFP
tagtgggtgggggggtggaaggagcgtgttaa

SEQ ID NO: 1299 - DNA, 32 bp, Artificial sequence
  Artificial aptamer to AFP,MMP9v
tagtgggtgggggggtggaaggggcgtgataa

SEQ ID NO: 1300 - DNA, 32 bp, Artificial sequence
  Artificial aptamer to MMP9v
tagtgggtgggggggtggaaggggcgtgatag

SEQ ID NO: 1301 - DNA, 32 bp, Artificial sequence
  Artificial aptamer to AFP
tagtgggtgggggggtggaaggtgcgtgataa

SEQ ID NO: 1302 - DNA, 32 bp, Artificial sequence
  Artificial aptamer to IGE
tagtgggtgggggggtggaaggtggggattag

SEQ ID NO: 1303 - DNA, 32 bp, Artificial sequence
  Artificial aptamer to MMP9v
tagtgggtgggggggtggagggagcgtgataa

SEQ ID NO: 1304 - DNA, 32 bp, Artificial sequence
  Artificial aptamer to MMP9v
tagtgggtggggggtggagggagcggtgataa

SEQ ID NO: 1305 - DNA, 32 bp, Artificial sequence
  Artificial aptamer to MMP9v
taggggagggcgggggggttagaaagcattga

SEQ ID NO: 1306 - DNA, 32 bp, Artificial sequence
  Artificial aptamer to AFP
tagggggcgggcgggtggaattgaggttaagt

SEQ ID NO: 1307 - DNA, 32 bp, Artificial sequence
  Artificial aptamer to AFP
taggggggtgggtgggcggagagtgagagtaa

SEQ ID NO: 1308 - DNA, 32 bp, Artificial sequence
  Artificial aptamer to MMP9v
taggggggtgggagggtggatggtagcggtgg

SEQ ID NO: 1309 - DNA, 32 bp, Artificial sequence
  Artificial aptamer to AFP
taggggggtgggcgggaggtaattgagtggat

SEQ ID NO: 1310 - DNA, 32 bp, Artificial sequence
  Artificial aptamer to AFP
taggggggtgggtgggcggagattgtaggtta

SEQ ID NO: 1311 - DNA, 32 bp, Artificial sequence
  Artificial aptamer to IGE
tagggggtaggtgggcggaaggtgcgtgataa

SEQ ID NO: 1312 - DNA, 32 bp, Artificial sequence
  Artificial aptamer to MMP9v
tagggggtgggtgggcggaaggtgcgtgataa

SEQ ID NO: 1313 - DNA, 32 bp, Artificial sequence
  Artificial aptamer to AFP
tagggggtgggtgggtggaagagagcaggaaa

SEQ ID NO: 1314 - DNA, 32 bp, Artificial sequence
  Artificial aptamer to MMP9v
taggggtcgggagggtgggtcagagtgcgtgc

SEQ ID NO: 1315 - DNA, 32 bp, Artificial sequence
  Artificial aptamer to MMP9v
tagggtgggagggatgggatagaagctggtta

SEQ ID NO: 1316 - DNA, 32 bp, Artificial sequence
  Artificial aptamer to MMP9v
tagggtgggggggagggcagagcgggacagaa

SEQ ID NO: 1317 - DNA, 32 bp, Artificial sequence
  Artificial aptamer to IGE
tagggttgggtgggggggcgcaaagcgtgaca

SEQ ID NO: 1318 - DNA, 32 bp, Artificial sequence
  Artificial aptamer to IGE
taggtgggagggtgggtggatagcagcagcgt

SEQ ID NO: 1319 - DNA, 32 bp, Artificial sequence
  Artificial aptamer to IGE
taggtgggagggtgggtggagttagcgacgta

SEQ ID NO: 1320 - DNA, 32 bp, Artificial sequence
  Artificial aptamer to IGE
taggtgggagggtgggtggagttagcggcata

SEQ ID NO: 1321 - DNA, 32 bp, Artificial sequence
  Artificial aptamer to AFP
taggtgggcgggcgggtggatggtaagcggta

SEQ ID NO: 1322 - DNA, 32 bp, Artificial sequence
  Artificial aptamer to AFP
taggtgggcgggtgggtggaaaattgaagtta

SEQ ID NO: 1323 - DNA, 32 bp, Artificial sequence
  Artificial aptamer to AFP
taggtgggggggtgggtggtattataagtgta

SEQ ID NO: 1324 - DNA, 32 bp, Artificial sequence
  Artificial aptamer to AFP
taggtgggggggagggtggataaagaggttta

SEQ ID NO: 1325 - DNA, 32 bp, Artificial sequence
  Artificial aptamer to IGE
taggtgggggggtgggtggtttatgacgctta

SEQ ID NO: 1326 - DNA, 32 bp, Artificial sequence
  Artificial aptamer to AFP
taggtgggggggtgggtggttttaaaagtgta

SEQ ID NO: 1327 - DNA, 32 bp, Artificial sequence
  Artificial aptamer to AFP
taggtgggggggtgggtggttttataagtgta

SEQ ID NO: 1328 - DNA, 32 bp, Artificial sequence
  Artificial aptamer to AFP
taggtgggggggtgggtggttttgtaagtgta

SEQ ID NO: 1329 - DNA, 32 bp, Artificial sequence
  Artificial aptamer to MMP9v
taggtgggtgggggggtggatatgtgcgcact

SEQ ID NO: 1330 - DNA, 32 bp, Artificial sequence
  Artificial aptamer to AFP
taggtgggtgggagggtggttatgggcggaca

SEQ ID NO: 1331 - DNA, 32 bp, Artificial sequence
  Artificial aptamer to AFP
taggtgggtgggtgggtggaaaattgaaatta

SEQ ID NO: 1332 - DNA, 32 bp, Artificial sequence
  Artificial aptamer to AFP
taggtgggtgggggggtggatatgtgcgtact

SEQ ID NO: 1333 - DNA, 32 bp, Artificial sequence
  Artificial aptamer to IGE
taggtgggtgggtgggtggtttatgacgcata

SEQ ID NO: 1334 - DNA, 32 bp, Artificial sequence
  Artificial aptamer to IGE
taggtgggtgggtgggtggttttataagtgta

SEQ ID NO: 1335 - DNA, 32 bp, Artificial sequence
  Artificial aptamer to IGE
tgagggagggtgggtggatgagtgcttatatg

SEQ ID NO: 1336 - DNA, 32 bp, Artificial sequence
  Artificial aptamer to AFP,MMP9v
tgagggtgggcgggtggaaagaaaaggggtta

SEQ ID NO: 1337 - DNA, 32 bp, Artificial sequence
  Artificial aptamer to AFP
tgagggtgggtgggtggaaagaaagcggtaga

SEQ ID NO: 1338 - DNA, 32 bp, Artificial sequence
  Artificial aptamer to AFP
tgagggtgggtgggtggaaaaggagagttgaa

SEQ ID NO: 1339 - DNA, 32 bp, Artificial sequence
  Artificial aptamer to IGE
tgagggtgggtgggtggaacaagagcgtggta

SEQ ID NO: 1340 - DNA, 32 bp, Artificial sequence
  Artificial aptamer to IGE
tgagggtgggtgggtggcaagaaagcagtaga

SEQ ID NO: 1341 - DNA, 32 bp, Artificial sequence
  Artificial aptamer to MMP9v
tgagtgggagggtgggtggtcagaggcgtttg

SEQ ID NO: 1342 - DNA, 32 bp, Artificial sequence
  Artificial aptamer to AFP
tgagtgggtgggcgggtggaattttgacggta

SEQ ID NO: 1343 - DNA, 32 bp, Artificial sequence
  Artificial aptamer to MMP9v
tgagtgggtgggggggatgggtataagtgttt

SEQ ID NO: 1344 - DNA, 32 bp, Artificial sequence
  Artificial aptamer to IGE
tgatagggagggagggagggtagtaagcgatg

SEQ ID NO: 1345 - DNA, 32 bp, Artificial sequence
  Artificial aptamer to AFP
tggagggggggtgggtggaagagaagcgagta

SEQ ID NO: 1346 - DNA, 32 bp, Artificial sequence
  Artificial aptamer to MMP9v
tggagggggggtgggtggaagggaagcgagta

SEQ ID NO: 1347 - DNA, 32 bp, Artificial sequence
  Artificial aptamer to AFP
tggagggggggtgggtggaagaggagcaagta

SEQ ID NO: 1348 - DNA, 32 bp, Artificial sequence
  Artificial aptamer to AFP
tggagggggggtgggtggaagaggagcgagaa

SEQ ID NO: 1349 - DNA, 32 bp, Artificial sequence
  Artificial aptamer to MMP9v
tggagggggggtgggtggaagaggggcgaata

SEQ ID NO: 1350 - DNA, 32 bp, Artificial sequence
  Artificial aptamer to MMP9v
tggagggggggtgggtggtattagcggactaa

SEQ ID NO: 1351 - DNA, 32 bp, Artificial sequence
  Artificial aptamer to MMP9v
tggagggggggtgggtggaaggggagcgagta

SEQ ID NO: 1352 - DNA, 32 bp, Artificial sequence
  Artificial aptamer to MMP9v
tggagggggggtgggtggaagggtagcgagta

SEQ ID NO: 1353 - DNA, 32 bp, Artificial sequence
  Artificial aptamer to MMP9v
tggaggggggtgggtggaagaggaggcgagta

SEQ ID NO: 1354 - DNA, 32 bp, Artificial sequence
  Artificial aptamer to AFP
tggagggtgggtgggtggaagaggagcgagta

SEQ ID NO: 1355 - DNA, 32 bp, Artificial sequence
  Artificial aptamer to MMP9v
tggagggtgggtgggtggagttgatgggtgag

SEQ ID NO: 1356 - DNA, 32 bp, Artificial sequence
  Artificial aptamer to AFP
tggagggtgggtgggtggataaagcgcggaaa

SEQ ID NO: 1357 - DNA, 32 bp, Artificial sequence
  Artificial aptamer to AFP
tggagggtgggttgggtggaagatgacgttta

SEQ ID NO: 1358 - DNA, 32 bp, Artificial sequence
  Artificial aptamer to AFP
tggagggtgggttgggtggaaggtaacgttta

SEQ ID NO: 1359 - DNA, 32 bp, Artificial sequence
  Artificial aptamer to IGE
tggagggtgggttgggtggatgataacgttta

SEQ ID NO: 1360 - DNA, 32 bp, Artificial sequence
  Artificial aptamer to IGE
tggaggtgggttgggtggaaggataacgttta

SEQ ID NO: 1361 - DNA, 32 bp, Artificial sequence
  Artificial aptamer to IGE
tgccgaatggagaggagtgggagggtgggcgg

SEQ ID NO: 1362 - DNA, 32 bp, Artificial sequence
  Artificial aptamer to MMP9v
tggagggagggtgggtggatagggcgtgctaa

SEQ ID NO: 1363 - DNA, 32 bp, Artificial sequence
  Artificial aptamer to IGE
tggagggagggtgggtggattgggcgagctaa

SEQ ID NO: 1364 - DNA, 32 bp, Artificial sequence
  Artificial aptamer to AFP
tggagggagggtgggtggattgggcgcgctaa

SEQ ID NO: 1365 - DNA, 32 bp, Artificial sequence
  Artificial aptamer to MMP9v
tggagggagggtgggtggattgggcgtgctaa

SEQ ID NO: 1366 - DNA, 32 bp, Artificial sequence
  Artificial aptamer to MMP9v
tggagggagggtgggtggattgggtgtgctaa

SEQ ID NO: 1367 - DNA, 32 bp, Artificial sequence
  Artificial aptamer to AFP
tggagggagggtgggtggatttagtggattta

SEQ ID NO: 1368 - DNA, 32 bp, Artificial sequence
  Artificial aptamer to AFP
tggagggcgggtgggtggatagagcgcggaaa

SEQ ID NO: 1369 - DNA, 32 bp, Artificial sequence
  Artificial aptamer to IGE
tggagggcgggtgggtggatgaagcgcggaaa

SEQ ID NO: 1370 - DNA, 32 bp, Artificial sequence
  Artificial aptamer to AFP,MMP9v
tggggggagggtgggtggtagggcgcgtgcaa

SEQ ID NO: 1371 - DNA, 32 bp, Artificial sequence
  Artificial aptamer to AFP
tggggggagggtgggtggtataaaggcggtga

SEQ ID NO: 1372 - DNA, 32 bp, Artificial sequence
  Artificial aptamer to AFP
tggggggagggtgggtggtatagagacggtga

SEQ ID NO: 1373 - DNA, 32 bp, Artificial sequence
  Artificial aptamer to AFP
tgggggggagggagggtaaaacaaagcggttg

SEQ ID NO: 1374 - DNA, 32 bp, Artificial sequence
  Artificial aptamer to MMP9v
tggggggcgggtgggaggaattgcgcggtcca

SEQ ID NO: 1375 - DNA, 32 bp, Artificial sequence
  Artificial aptamer to AFP
tggggggcgggtgggtggataaagcgcggaaa

SEQ ID NO: 1376 - DNA, 32 bp, Artificial sequence
  Artificial aptamer to MMP9v
tgggggggggtgggtggaggtgtgcgttaatg

SEQ ID NO: 1377 - DNA, 32 bp, Artificial sequence
  Artificial aptamer to IGE
tgggggggtgggtagggtttcggagcgatgaa

SEQ ID NO: 1378 - DNA, 32 bp, Artificial sequence
  Artificial aptamer to IGE
tgggggggtgggtagggtttcggagcgatgag

SEQ ID NO: 1379 - DNA, 32 bp, Artificial sequence
  Artificial aptamer to MMP9v
tgggggggtgggtcgggtggacatgaagtttg

SEQ ID NO: 1380 - DNA, 32 bp, Artificial sequence
  Artificial aptamer to MMP9v
tgggggggtgggtcgggtggacatgaggtttg

SEQ ID NO: 1381 - DNA, 32 bp, Artificial sequence
  Artificial aptamer to AFP
tggggggtgggtggggggaagagagcaataaa

SEQ ID NO: 1382 - DNA, 32 bp, Artificial sequence
  Artificial aptamer to AFP
tggggggtgggtgggaggaataggtgcggtaa

SEQ ID NO: 1383 - DNA, 32 bp, Artificial sequence
  Artificial aptamer to AFP
tggggggtgggtgggtggaagagagcaataaa

SEQ ID NO: 1384 - DNA, 32 bp, Artificial sequence
  Artificial aptamer to AFP
tggggggtgggtgggtggaagagagcaggaaa

SEQ ID NO: 1385 - DNA, 32 bp, Artificial sequence
  Artificial aptamer to MMP9v
tggggggtgggtgggtggtagggcgcgtgcaa

SEQ ID NO: 1386 - DNA, 32 bp, Artificial sequence
  Artificial aptamer to MMP9v
tgggggtgggtgggtggaaggtatagggttaa

SEQ ID NO: 1387 - DNA, 32 bp, Artificial sequence
  Artificial aptamer to AFP
tgggggtgggtgggtggtaaaagagctttcaa

SEQ ID NO: 1388 - DNA, 32 bp, Artificial sequence
  Artificial aptamer to IGE
tgggagggggggagggtaaaatagcggcgcaa

SEQ ID NO: 1389 - DNA, 32 bp, Artificial sequence
  Artificial aptamer to MMP9v
tgggagaagtcggtgggggggtgggaggagac

SEQ ID NO: 1390 - DNA, 32 bp, Artificial sequence
  Artificial aptamer to IGE
tgggagggagggtgggtaataagtgcgtcaaa

SEQ ID NO: 1391 - DNA, 32 bp, Artificial sequence
  Artificial aptamer to IGE
tgggagggggggtgggcgagcagtttgatgag

SEQ ID NO: 1392 - DNA, 32 bp, Artificial sequence
  Artificial aptamer to MMP9v
tgggatgggttgggcggggaaaaagcggtgga

SEQ ID NO: 1393 - DNA, 32 bp, Artificial sequence
  Artificial aptamer to AFP,MMP9v
tgggattgggtgggtgggtcaaggtttagtcg

SEQ ID NO: 1394 - DNA, 32 bp, Artificial sequence
  Artificial aptamer to MMP9v
tgggcctactgtatctgggtagggtggggggg

SEQ ID NO: 1395 - DNA, 32 bp, Artificial sequence
  Artificial aptamer to IGE
tgggcgggagggggggtaaaagatgcgattga

SEQ ID NO: 1396 - DNA, 32 bp, Artificial sequence
  Artificial aptamer to MMP9v
tggggaggggtgggggggttttaaacgtgcaa

SEQ ID NO: 1397 - DNA, 32 bp, Artificial sequence
  Artificial aptamer to IGE
tgggggagggtgggtggaatgagctgaaaaaa

SEQ ID NO: 1398 - DNA, 32 bp, Artificial sequence
  Artificial aptamer to AFP
tgggggagggtgggtggaatgagcggaaaaaa

SEQ ID NO: 1399 - DNA, 32 bp, Artificial sequence
  Artificial aptamer to IGE
tgggggagggtgggtgggtataaagacggtga

SEQ ID NO: 1400 - DNA, 32 bp, Artificial sequence
  Artificial aptamer to IGE
tgggggagggtgggtgggtgatgcgagcgggc

SEQ ID NO: 1401 - DNA, 32 bp, Artificial sequence
  Artificial aptamer to AFP
tggtgcgggtgggtagggtggataattgcgta

SEQ ID NO: 1402 - DNA, 32 bp, Artificial sequence
  Artificial aptamer to AFP,MMP9v
tggtgggagggtgggtggatgggagcagttaa

SEQ ID NO: 1403 - DNA, 32 bp, Artificial sequence
  Artificial aptamer to AFP
tggtgggagggtgggtggtataagaagcggaa

SEQ ID NO: 1404 - DNA, 32 bp, Artificial sequence
  Artificial aptamer to IGE
tggtgggcgggggggtggagatcgagccatta

SEQ ID NO: 1405 - DNA, 32 bp, Artificial sequence
  Artificial aptamer to AFP
tggtgggcgggtgggtggataaagcgcggaaa

SEQ ID NO: 1406 - DNA, 32 bp, Artificial sequence
  Artificial aptamer to MMP9v
tggtgggggggagggtggaggggagcgaatcc

SEQ ID NO: 1407 - DNA, 32 bp, Artificial sequence
  Artificial aptamer to AFP
tggtgggggggcgggtggtagtcaagcgagta

SEQ ID NO: 1408 - DNA, 32 bp, Artificial sequence
  Artificial aptamer to AFP
tggtgggggggtgggcggaattgaaagataaa

SEQ ID NO: 1409 - DNA, 32 bp, Artificial sequence
  Artificial aptamer to MMP9v
tggtgggggggtgggtggtattagcggactaa

SEQ ID NO: 1410 - DNA, 32 bp, Artificial sequence
  Artificial aptamer to AFP
tggtgggggggtgggtggtattagcggattaa

SEQ ID NO: 1411 - DNA, 32 bp, Artificial sequence
  Artificial aptamer to MMP9v
tggtgggggggtgggtggtattagcgtactaa

SEQ ID NO: 1412 - DNA, 32 bp, Artificial sequence
  Artificial aptamer to AFP
tggggtgggggggagggttagagcgttcgctg

SEQ ID NO: 1413 - DNA, 32 bp, Artificial sequence
  Artificial aptamer to MMP9v
tggggtgggaaatggtgggtgggcgagcgtaa

SEQ ID NO: 1414 - DNA, 32 bp, Artificial sequence
  Artificial aptamer to MMP9v
tggggttgggggggtgggttaagagcgagtca

SEQ ID NO: 1415 - DNA, 32 bp, Artificial sequence
  Artificial aptamer to MMP9v
tgggtgggatatgggtgggtaagagcaaataa

SEQ ID NO: 1416 - DNA, 32 bp, Artificial sequence
  Artificial aptamer to MMP9v
tgggtgggtaagcgacgggtgggtaaaagcgt

SEQ ID NO: 1417 - DNA, 32 bp, Artificial sequence
  Artificial aptamer to MMP9v
tgggtgggtaatgggtgggttgcggatagaat

SEQ ID NO: 1418 - DNA, 32 bp, Artificial sequence
  Artificial aptamer to IGE
tgggtgggggggacgggtacaagcggagatcg

SEQ ID NO: 1419 - DNA, 32 bp, Artificial sequence
  Artificial aptamer to IGE
tgggtgggggggacgggtataagcggagatcg

SEQ ID NO: 1420 - DNA, 32 bp, Artificial sequence
  Artificial aptamer to IGE
tgggtgggggggacgggtatacgcggagatcg

SEQ ID NO: 1421 - DNA, 32 bp, Artificial sequence
  Artificial aptamer to IGE
tgggtgggggggtcgggtataagcggagatcg

SEQ ID NO: 1422 - DNA, 32 bp, Artificial sequence
  Artificial aptamer to IGE
tgggtgggtgggtgggtgaaaggagagtttaa

SEQ ID NO: 1423 - DNA, 32 bp, Artificial sequence
  Artificial aptamer to MMP9v
tggtagcgggggggtgggtggaaccaatagcg

SEQ ID NO: 1424 - DNA, 32 bp, Artificial sequence
  Artificial aptamer to IGE
tgtcgaaaaatagcgggggggtgggtggaaat

SEQ ID NO: 1425 - DNA, 32 bp, Artificial sequence
  Artificial aptamer to AFP
tgtgacggaaggagaggagggtgggtgggtgg

SEQ ID NO: 1426 - DNA, 32 bp, Artificial sequence
  Artificial aptamer to AFP
tgtgggagggtgggtggaaaaggagagttgaa

SEQ ID NO: 1427 - DNA, 32 bp, Artificial sequence
  Artificial aptamer to IGE
tgtgggagggtgggtggaaggagtgcgtgata

SEQ ID NO: 1428 - DNA, 32 bp, Artificial sequence
  Artificial aptamer to IGE
tggtgggtgggcggggggtaattaaagcgatg

SEQ ID NO: 1429 - DNA, 32 bp, Artificial sequence
  Artificial aptamer to AFP,MMP9v
tggtgggtgggagggtggaattgtgggggtga

SEQ ID NO: 1430 - DNA, 32 bp, Artificial sequence
  Artificial aptamer to IGE
tggtgggtgggagggtggagtagaaggcgttg

SEQ ID NO: 1431 - DNA, 32 bp, Artificial sequence
  Artificial aptamer to AFP
tggtgggtgggtggggggaatttgaaaggaga

SEQ ID NO: 1432 - DNA, 32 bp, Artificial sequence
  Artificial aptamer to AFP
tggtgggtgggtggggggtaattaaagcgatg

SEQ ID NO: 1433 - DNA, 32 bp, Artificial sequence
  Artificial aptamer to AFP
tggtgggtgggtgggtggtaattaaagcgatg

SEQ ID NO: 1434 - DNA, 32 bp, Artificial sequence
  Artificial aptamer to IGE
tggtgggtgggtgggtggaaaggagagttgaa

SEQ ID NO: 1435 - DNA, 32 bp, Artificial sequence
  Artificial aptamer to IGE
tggtgggtgggtgggtggaataaagagtgtag

SEQ ID NO: 1436 - DNA, 32 bp, Artificial sequence
  Artificial aptamer to AFP
tggtgggtgggtgggtggaatttgaaaggaga

SEQ ID NO: 1437 - DNA, 32 bp, Artificial sequence
  Artificial aptamer to MMP9v
tggtgggtgggtgggtggaatttgaagggaga

SEQ ID NO: 1438 - DNA, 32 bp, Artificial sequence
  Artificial aptamer to IGE
tgtaatcgggagggagggggggtcaagagtgt

SEQ ID NO: 1439 - DNA, 32 bp, Artificial sequence
  Artificial aptamer to MMP9v
tgtcaggtgggggggcgggtggatgacatgcg

SEQ ID NO: 1440 - DNA, 32 bp, Artificial sequence
  Artificial aptamer to AFP
tgttcagggagggagggggggcaagcgtattg

SEQ ID NO: 1441 - DNA, 32 bp, Artificial sequence
  Artificial aptamer to MMP9v
tgttttagggagggagggggggaaaacggata

SEQ ID NO: 1442 - DNA, 32 bp, Artificial sequence
  Artificial aptamer to MMP9v
ttaaaggggagggagggcgggaaaagcggaag

SEQ ID NO: 1443 - DNA, 32 bp, Artificial sequence
  Artificial aptamer to AFP,IGE
ttaagggggggagggagggcaaagcaggcata

SEQ ID NO: 1444 - DNA, 32 bp, Artificial sequence
  Artificial aptamer to IGE
ttaagggggggagggagggcaaagcaggcgta

SEQ ID NO: 1445 - DNA, 32 bp, Artificial sequence
  Artificial aptamer to IGE
ttaacttgcaaaacccggcgcacgagaaaagg

SEQ ID NO: 1446 - DNA, 32 bp, Artificial sequence
  Artificial aptamer to IGE
ttaagggggggagggagggcaaagcgggcata

SEQ ID NO: 1447 - DNA, 32 bp, Artificial sequence
  Artificial aptamer to MMP9v
ttaatgggtcgggtgggagggtatgagcgcgt

SEQ ID NO: 1448 - DNA, 32 bp, Artificial sequence
  Artificial aptamer to IGE
ttacaggggagggtgggggggcaagagcggag

SEQ ID NO: 1449 - DNA, 32 bp, Artificial sequence
  Artificial aptamer to AFP
tgtgggcgggtgggtggaaaaggagagttgaa

SEQ ID NO: 1450 - DNA, 32 bp, Artificial sequence
  Artificial aptamer to AFP
tgtgggtgggagggtggaaaaggagagttgaa

SEQ ID NO: 1451 - DNA, 32 bp, Artificial sequence
  Artificial aptamer to AFP
tgtgggtgggagggtggaaggtagcggcattc

SEQ ID NO: 1452 - DNA, 32 bp, Artificial sequence
  Artificial aptamer to AFP
tgtgggtgggcgggtggactatagcgttcgga

SEQ ID NO: 1453 - DNA, 32 bp, Artificial sequence
  Artificial aptamer to AFP
tgtgggtgggcgggtggattatagcgttcaga

SEQ ID NO: 1454 - DNA, 32 bp, Artificial sequence
  Artificial aptamer to MMP9v
tgtgggtgggcgggtggattatagggttcgga

SEQ ID NO: 1455 - DNA, 32 bp, Artificial sequence
  Artificial aptamer to AFP
tgtgggtgggtgagtggaaaaggagagttgaa

SEQ ID NO: 1456 - DNA, 32 bp, Artificial sequence
  Artificial aptamer to AFP
tgtgggtgggggggtggttatgagcgatttca

SEQ ID NO: 1457 - DNA, 32 bp, Artificial sequence
  Artificial aptamer to IGE
tgtgggtgggggggtggttatgggcgatttca

SEQ ID NO: 1458 - DNA, 32 bp, Artificial sequence
  Artificial aptamer to AFP
tgtgggtggggggtggcggaatttgatgtagg

SEQ ID NO: 1459 - DNA, 32 bp, Artificial sequence
  Artificial aptamer to MMP9v
tgtgggtgggtgggcggcatgaagcgggtata

SEQ ID NO: 1460 - DNA, 32 bp, Artificial sequence
  Artificial aptamer to IGE
tgtgggtgggtgggaggttatcagcgtgaaaa

SEQ ID NO: 1461 - DNA, 32 bp, Artificial sequence
  Artificial aptamer to AFP
tgtgggtgggtgggtggaaaagaagagttgaa

SEQ ID NO: 1462 - DNA, 32 bp, Artificial sequence
  Artificial aptamer to AFP
tgtgggtgggtgggtggaaaaggaaagttgaa

SEQ ID NO: 1463 - DNA, 32 bp, Artificial sequence
  Artificial aptamer to IGE
tgtgggtgggtggggggtaagagcggttccga

SEQ ID NO: 1464 - DNA, 32 bp, Artificial sequence
  Artificial aptamer to AFP
tgtgggtgggtgggtggaaaaagagagttgaa

SEQ ID NO: 1465 - DNA, 32 bp, Artificial sequence
  Artificial aptamer to AFP
tgtgggtgggtgggtggaaaaggagagttaaa

SEQ ID NO: 1466 - DNA, 32 bp, Artificial sequence
  Artificial aptamer to AFP
tgtgggtgggtgggtggaaaaggagagttgag

SEQ ID NO: 1467 - DNA, 32 bp, Artificial sequence
  Artificial aptamer to AFP
tgtgggtgggtgggtggaaaaggagagttgat

SEQ ID NO: 1468 - DNA, 32 bp, Artificial sequence
  Artificial aptamer to AFP
tgtgggtgggtgggtggaaaaggagagttgca

SEQ ID NO: 1469 - DNA, 32 bp, Artificial sequence
  Artificial aptamer to AFP,MMP9v
tgtgggtgggtgggtggaaaaggagggttgaa

SEQ ID NO: 1470 - DNA, 32 bp, Artificial sequence
  Artificial aptamer to MMP9v
tgtgggtgggtgggtggaaaaggagggttgga

SEQ ID NO: 1471 - DNA, 32 bp, Artificial sequence
  Artificial aptamer to AFP
tgtgggtgggtgggtggaaaaggagtgttgaa

SEQ ID NO: 1472 - DNA, 32 bp, Artificial sequence
  Artificial aptamer to MMP9v
tgtgggtgggtgggtggaaaaggggagttgaa

SEQ ID NO: 1473 - DNA, 32 bp, Artificial sequence
  Artificial aptamer to AFP
tgtgggtgggtgggtggaataggagagttgaa

SEQ ID NO: 1474 - DNA, 32 bp, Artificial sequence
  Artificial aptamer to MMP9v
tgtgggtgggtgggtggaaagggagagttgaa

SEQ ID NO: 1475 - DNA, 32 bp, Artificial sequence
  Artificial aptamer to AFP
tgtgggtgggtgggtggaagaagagcggcgaa

SEQ ID NO: 1476 - DNA, 32 bp, Artificial sequence
  Artificial aptamer to AFP
tgtgggtgggtgggtggaagaggagagttgaa

SEQ ID NO: 1477 - DNA, 32 bp, Artificial sequence
  Artificial aptamer to AFP
tgtgggtgggtgggtggatagtttattggatg

SEQ ID NO: 1478 - DNA, 32 bp, Artificial sequence
  Artificial aptamer to AFP
tgtgggtgggtgggtggagaaggagagttgaa

SEQ ID NO: 1479 - DNA, 32 bp, Artificial sequence
  Artificial aptamer to IGE
tgtgggtgggtgggtggagaaggagagttgta

SEQ ID NO: 1480 - DNA, 32 bp, Artificial sequence
  Artificial aptamer to AFP
tgtgggtgggtgggtggataaggagagttgaa

SEQ ID NO: 1481 - DNA, 32 bp, Artificial sequence
  Artificial aptamer to IGE
tgtgggtgggtgggtggataaggagagttgag

SEQ ID NO: 1482 - DNA, 32 bp, Artificial sequence
  Artificial aptamer to MMP9v
tgtgggtgggtgggtggatagagcgaggtaag

SEQ ID NO: 1483 - DNA, 32 bp, Artificial sequence
  Artificial aptamer to AFP
tgtgggtgggtgggtggattatagcgttcgga

SEQ ID NO: 1484 - DNA, 32 bp, Artificial sequence
  Artificial aptamer to AFP
tgtgggtgggtgggtggtaaaggagagttgaa

SEQ ID NO: 1485 - DNA, 32 bp, Artificial sequence
  Artificial aptamer to MMP9v
tgtgggtgtggtggggggggaaaaagcggtaa

SEQ ID NO: 1486 - DNA, 32 bp, Artificial sequence
  Artificial aptamer to IGE
tgtggtagtgggtgggcggggtcaagcgaata

SEQ ID NO: 1487 - DNA, 32 bp, Artificial sequence
  Artificial aptamer to AFP
tgtgtgggagggcgggtggtcagaggcgtttg

SEQ ID NO: 1488 - DNA, 32 bp, Artificial sequence
  Artificial aptamer to AFP
tgtgtgggagggtgggtggtcagaggtgtttg

SEQ ID NO: 1489 - DNA, 32 bp, Artificial sequence
  Artificial aptamer to IGE
tgtgtgggagggtgggtggtcagagacgttta

SEQ ID NO: 1490 - DNA, 32 bp, Artificial sequence
  Artificial aptamer to AFP
tgtgtgggagggtgggtggtctgaggcgtttg

SEQ ID NO: 1491 - DNA, 32 bp, Artificial sequence
  Artificial aptamer to AFP
tgtgtgggagggtgggtggttagaggcgtttg

SEQ ID NO: 1492 - DNA, 32 bp, Artificial sequence
  Artificial aptamer to AFP
tgtgtgggagggtgggtggtcggaggcgtttg

SEQ ID NO: 1493 - DNA, 32 bp, Artificial sequence
  Artificial aptamer to AFP
tgtgtgggtgggtgggtggtcagaggcgtttg

SEQ ID NO: 1494 - DNA, 32 bp, Artificial sequence
  Artificial aptamer to AFP
ttcgggggagggggggtgggtaaacgcgcgta

SEQ ID NO: 1495 - DNA, 32 bp, Artificial sequence
  Artificial aptamer to AFP
ttctgggagggagggtgggtcctagagcgaga

SEQ ID NO: 1496 - DNA, 32 bp, Artificial sequence
  Artificial aptamer to AFP
ttgaagaggtgggtgggtgggttgagcggcga

SEQ ID NO: 1497 - DNA, 32 bp, Artificial sequence
  Artificial aptamer to AFP
ttgaggcgggagggtgggtggtaaaataggcg

SEQ ID NO: 1498 - DNA, 32 bp, Artificial sequence
  Artificial aptamer to IGE
ttgaggcgggggggtgggtgggaaaataggcg

SEQ ID NO: 1499 - DNA, 32 bp, Artificial sequence
  Artificial aptamer to AFP
ttgaggcgggagggtgggtggaacaataggcg

SEQ ID NO: 1500 - DNA, 32 bp, Artificial sequence
  Artificial aptamer to MMP9v
ttgaggcgggagggtgggtggaacaatgggcg

SEQ ID NO: 1501 - DNA, 32 bp, Artificial sequence
  Artificial aptamer to IGE
ttactagggtgggagggggggctaataagtgc

SEQ ID NO: 1502 - DNA, 32 bp, Artificial sequence
  Artificial aptamer to IGE
ttagggagggggggagggaaaatcgatgtgag

SEQ ID NO: 1503 - DNA, 32 bp, Artificial sequence
  Artificial aptamer to AFP,IGE,MMP9v
ttagggggtgggagggagggcaaagcggaata

SEQ ID NO: 1504 - DNA, 32 bp, Artificial sequence
  Artificial aptamer to MMP9v
ttagtgggtgggagggtggtgataaagggtta

SEQ ID NO: 1505 - DNA, 32 bp, Artificial sequence
  Artificial aptamer to MMP9v
ttagtgggtgggggggtggtgataaagggtta

SEQ ID NO: 1506 - DNA, 32 bp, Artificial sequence
  Artificial aptamer to MMP9v
ttatgggagggatagggtgggggaaagcggtg

SEQ ID NO: 1507 - DNA, 32 bp, Artificial sequence
  Artificial aptamer to IGE
ttatgggggggagggttgggacaggcgcatta

SEQ ID NO: 1508 - DNA, 32 bp, Artificial sequence
  Artificial aptamer to MMP9v
ttatgggtggtagtgggggggtaaagggggta

SEQ ID NO: 1509 - DNA, 32 bp, Artificial sequence
  Artificial aptamer to IGE
ttatttgggggggagggagggataagggtttg

SEQ ID NO: 1510 - DNA, 32 bp, Artificial sequence
  Artificial aptamer to MMP9v
ttcagggggggtagggtgggcaagcattcaaa

SEQ ID NO: 1511 - DNA, 32 bp, Artificial sequence
  Artificial aptamer to AFP,MMP9v
ttcagggggggtagggtgggcaagcgttcaaa

SEQ ID NO: 1512 - DNA, 32 bp, Artificial sequence
  Artificial aptamer to IGE
ttcagggggggagggcgggcaaagtggttcta

SEQ ID NO: 1513 - DNA, 32 bp, Artificial sequence
  Artificial aptamer to MMP9v
ttcagggggggtagggtgggcaggtgttcaaa

SEQ ID NO: 1514 - DNA, 32 bp, Artificial sequence
  Artificial aptamer to MMP9v
ttcagggggggtagggtgggtaagcgttcaaa

SEQ ID NO: 1515 - DNA, 32 bp, Artificial sequence
  Artificial aptamer to AFP
ttcctgggggggcgggggggtcatgcggaata

SEQ ID NO: 1516 - DNA, 32 bp, Artificial sequence
  Artificial aptamer to AFP
ttgtgggcgggtgggtggaaggagacgcttta

SEQ ID NO: 1517 - DNA, 32 bp, Artificial sequence
  Artificial aptamer to AFP
ttgtgggtgggggggtggaaggagcgtgataa

SEQ ID NO: 1518 - DNA, 32 bp, Artificial sequence
  Artificial aptamer to IGE
ttgtgggtgggtgggaggtacagagcggcgta

SEQ ID NO: 1519 - DNA, 32 bp, Artificial sequence
  Artificial aptamer to IGE
ttgtgggtgggtgggaggcaaagagcgacgta

SEQ ID NO: 1520 - DNA, 32 bp, Artificial sequence
  Artificial aptamer to IGE
ttgtgggtgggtgggaggtaaagagcggcgtg

SEQ ID NO: 1521 - DNA, 32 bp, Artificial sequence
  Artificial aptamer to IGE
tttaaagggggggagggagggcaaaagcgcaa

SEQ ID NO: 1522 - DNA, 32 bp, Artificial sequence
  Artificial aptamer to AFP,IGE
tttaagggagggagggcgggcaaagcggatga

SEQ ID NO: 1523 - DNA, 32 bp, Artificial sequence
  Artificial aptamer to IGE
tttaagggagggagggcgggcaaggcggataa

SEQ ID NO: 1524 - DNA, 32 bp, Artificial sequence
  Artificial aptamer to IGE
tttaagggtgggggggagggcagagcgcacaa

SEQ ID NO: 1525 - DNA, 32 bp, Artificial sequence
  Artificial aptamer to AFP,MMP9v
tttagggtgggacgggggggcaaagcgtctat

SEQ ID NO: 1526 - DNA, 32 bp, Artificial sequence
  Artificial aptamer to IGE
tttagggtgggagggggggcggagcggttgaa

SEQ ID NO: 1527 - DNA, 32 bp, Artificial sequence
  Artificial aptamer to IGE
tttagggagggcgggggggcatagagcggaac

SEQ ID NO: 1528 - DNA, 32 bp, Artificial sequence
  Artificial aptamer to IGE
tttcagggagggcgggagggctaagcggacca

SEQ ID NO: 1529 - DNA, 32 bp, Artificial sequence
  Artificial aptamer to MMP9v
tttagggtgggagggggggttcggagcggaga

SEQ ID NO: 1530 - DNA, 32 bp, Artificial sequence
  Artificial aptamer to AFP
tttagggtgggagggggggttcggagcggcga

SEQ ID NO: 1531 - DNA, 32 bp, Artificial sequence
  Artificial aptamer to IGE
tttatagggagggagggcgggcatagcgataa

SEQ ID NO: 1532 - DNA, 32 bp, Artificial sequence
  Artificial aptamer to AFP,IGE,MMP9v
tttcgggagggagggtgggtcagagggtgaca

SEQ ID NO: 1533 - DNA, 32 bp, Artificial sequence
  Artificial aptamer to MMP9v
tttcgggagggagggtgggtcagaggttgaca

SEQ ID NO: 1534 - DNA, 32 bp, Artificial sequence
  Artificial aptamer to IGE
tttcgggagggatgggtgggttagtgcgtaca

SEQ ID NO: 1535 - DNA, 32 bp, Artificial sequence
  Artificial aptamer to AFP
ttgaggcgggtgggtgggtggaaaaataggcg

SEQ ID NO: 1536 - DNA, 32 bp, Artificial sequence
  Artificial aptamer to AFP
ttgagggagggtgggtggtacagagcaaaata

SEQ ID NO: 1537 - DNA, 32 bp, Artificial sequence
  Artificial aptamer to MMP9v
ttgagggtgggagggtgggtggaaaataggcg

SEQ ID NO: 1538 - DNA, 32 bp, Artificial sequence
  Artificial aptamer to AFP
ttgaggtgggagggtgggtggaaaaataggcg

SEQ ID NO: 1539 - DNA, 32 bp, Artificial sequence
  Artificial aptamer to AFP
ttgagtgggcgggtgggtggaaaatgaggtgt

SEQ ID NO: 1540 - DNA, 32 bp, Artificial sequence
  Artificial aptamer to AFP
ttggagaagtcggtgggggggtgggaggagac

SEQ ID NO: 1541 - DNA, 32 bp, Artificial sequence
  Artificial aptamer to IGE
ttggaggcgggagggtgggtggaaaataggcg

SEQ ID NO: 1542 - DNA, 32 bp, Artificial sequence
  Artificial aptamer to MMP9v
ttggagggggggtgggtggaaatagggcgggc

SEQ ID NO: 1543 - DNA, 32 bp, Artificial sequence
  Artificial aptamer to IGE
ttgggagggggggcgggtagagtggttaatcg

SEQ ID NO: 1544 - DNA, 32 bp, Artificial sequence
  Artificial aptamer to IGE
ttgggagggagggggggtaaaagagtggaaaa

SEQ ID NO: 1545 - DNA, 32 bp, Artificial sequence
  Artificial aptamer to MMP9v
ttggggatgggcgggggggttgagcagagcga

SEQ ID NO: 1546 - DNA, 32 bp, Artificial sequence
  Artificial aptamer to MMP9v
ttggggggggatagttgggtggggagcgatga

SEQ ID NO: 1547 - DNA, 32 bp, Artificial sequence
  Artificial aptamer to IGE
ttgggggggggtgggatgggtcaaagtgtgaa

SEQ ID NO: 1548 - DNA, 32 bp, Artificial sequence
  Artificial aptamer to IGE
ttgggtgggtaagggggggtaaaagagtgcaa

SEQ ID NO: 1549 - DNA, 32 bp, Artificial sequence
  Artificial aptamer to MMP9v
ttgggtgggatgggggggatcaagcgtaaata

SEQ ID NO: 1550 - DNA, 32 bp, Artificial sequence
  Artificial aptamer to MMP9v
ttgggtggtctgagggtgggggagggtttcag

SEQ ID NO: 1551 - DNA, 32 bp, Artificial sequence
  Artificial aptamer to MMP9v
ttgggttagggtgggggggtggagcgtacaga

SEQ ID NO: 1552 - DNA, 32 bp, Artificial sequence
  Artificial aptamer to AFP
ttggtgggagggtgggcggaagaaggagttta

SEQ ID NO: 1553 - DNA, 32 bp, Artificial sequence
  Artificial aptamer to MMP9v
ttggtgggtcgggggggtggaaattagggcag

SEQ ID NO: 1554 - DNA, 32 bp, Artificial sequence
  Artificial aptamer to AFP
ttggtgggtgggagggtggtaaaagtgtgcga

SEQ ID NO: 1555 - DNA, 32 bp, Artificial sequence
  Artificial aptamer to MMP9v
tttggagggtgggtgggtggaaagaaagcgaa

SEQ ID NO: 1556 - DNA, 32 bp, Artificial sequence
  Artificial aptamer to AFP
tttggagggtgggggggtggaaaatatagacg

SEQ ID NO: 1557 - DNA, 32 bp, Artificial sequence
  Artificial aptamer to MMP9v
tttggggggtgggggggtggaaaatatagacg

SEQ ID NO: 1558 - DNA, 32 bp, Artificial sequence
  Artificial aptamer to MMP9v
tttgggagggggtgggcgggtcagagcagttt

SEQ ID NO: 1559 - DNA, 32 bp, Artificial sequence
  Artificial aptamer to MMP9v
tttggggagggtggggtgggatagagcattga

SEQ ID NO: 1560 - DNA, 32 bp, Artificial sequence
  Artificial aptamer to MMP9v
tttgggggggtgggatgggtagtgcgttcaga

SEQ ID NO: 1561 - DNA, 32 bp, Artificial sequence
  Artificial aptamer to MMP9v
tttggggttatgggtgggtgggtagagcgtag

SEQ ID NO: 1562 - DNA, 32 bp, Artificial sequence
  Artificial aptamer to IGE
tttgggtggtagtgggtgggtgttgagctaaa

SEQ ID NO: 1563 - DNA, 32 bp, Artificial sequence
  Artificial aptamer to AFP,MMP9v
tttgggtgggtcgggagggttacgagttttta

SEQ ID NO: 1564 - DNA, 32 bp, Artificial sequence
  Artificial aptamer to MMP9v
tttgggtgggtcgggctgggtttaagtagcgt

SEQ ID NO: 1565 - DNA, 32 bp, Artificial sequence
  Artificial aptamer to MMP9v
tttgtgggtagggtgggagggattatagttta

SEQ ID NO: 1566 - DNA, 32 bp, Artificial sequence
  Artificial aptamer to AFP
tttgtgggagggtgggtggtcagaggcgtttg

SEQ ID NO: 1567 - DNA, 32 bp, Artificial sequence
  Artificial aptamer to AFP
tttgtgggtgggagggtggcaattgtacgtta

SEQ ID NO: 1568 - DNA, 32 bp, Artificial sequence
  Artificial aptamer to IGE
tttgtgggtgggagggtggcagttgtacgtta

SEQ ID NO: 1569 - DNA, 32 bp, Artificial sequence
  Artificial aptamer to MMP9v
ttttagggagggagggcgggcaaagcggatga

SEQ ID NO: 1570 - DNA, 32 bp, Artificial sequence
  Artificial aptamer to MMP9v
ttttcgggtgggtcgggggggttctaagagcg

SEQ ID NO: 1571 - DNA, 32 bp, Artificial sequence
  Artificial aptamer to IGE
ttttggggagggagggcgggatatggcgtatg

SEQ ID NO: 1572 - DNA, 32 bp, Artificial sequence
  Artificial aptamer to IgGm
aaagcgccggggacaacgagcggtttggggtt

SEQ ID NO: 1573 - DNA, 32 bp, Artificial sequence
  Artificial aptamer to IgGm
aaagcggaggatggagtggaaactttaacact

SEQ ID NO: 1574 - DNA, 32 bp, Artificial sequence
  Artificial aptamer to IgGh
aacccaataccgggacgctatccgtgggttgt

SEQ ID NO: 1575 - DNA, 32 bp, Artificial sequence
  Artificial aptamer to IgGm
aaccgggcccggaaaccgggtaacatcaccga

SEQ ID NO: 1576 - DNA, 32 bp, Artificial sequence
  Artificial aptamer to IgGm
aacctgggaggagggcattacatggcctgcta

SEQ ID NO: 1577 - DNA, 32 bp, Artificial sequence
  Artificial aptamer to IgGm
aacgggaggcatcgcgcgcatgaatgcctctt

SEQ ID NO: 1578 - DNA, 32 bp, Artificial sequence
  Artificial aptamer to IgGh
aagcaggtagcaagcaacaagctgttgcagga

SEQ ID NO: 1579 - DNA, 32 bp, Artificial sequence
  Artificial aptamer to IgGm
aagtccacggaggtaggtgggcaaggcacttt

SEQ ID NO: 1580 - DNA, 32 bp, Artificial sequence
  Artificial aptamer to IgGh
acaaatcgtcggaggaatgaaggctctgacga

SEQ ID NO: 1581 - DNA, 32 bp, Artificial sequence
  Artificial aptamer to IgGh
acaaattacccgggggcggtggaggtgggaga

SEQ ID NO: 1582 - DNA, 32 bp, Artificial sequence
  Artificial aptamer to IgGm
acaaggaaggcctacaagaaacccttgtggca

SEQ ID NO: 1583 - DNA, 32 bp, Artificial sequence
  Artificial aptamer to IgGh
acacgctcacgagggcccttgcggcccataat

SEQ ID NO: 1584 - DNA, 32 bp, Artificial sequence
  Artificial aptamer to IgGh
acaggtggtgggggaactagaatacgctacta

SEQ ID NO: 1585 - DNA, 32 bp, Artificial sequence
  Artificial aptamer to IgGm
accacgcagcgcacttacgctaggcgaagaac

SEQ ID NO: 1586 - DNA, 32 bp, Artificial sequence
  Artificial aptamer to IgGm
acccaacagtgacagcttagatgaagctgcat

SEQ ID NO: 1587 - DNA, 32 bp, Artificial sequence
  Artificial aptamer to IgGh
acccgcgactcggcaggtggtaggaggagggt

SEQ ID NO: 1588 - DNA, 32 bp, Artificial sequence
  Artificial aptamer to IgGm
acccgggaaagattcccggaatatgcatgaac

SEQ ID NO: 1589 - DNA, 32 bp, Artificial sequence
  Artificial aptamer to IgGm
acccggtgaatgttctcatatcactggaccac

SEQ ID NO: 1590 - DNA, 32 bp, Artificial sequence
  Artificial aptamer to IgGm
accgcggtgtctccctattcgctaggggcgcg

SEQ ID NO: 1591 - DNA, 32 bp, Artificial sequence
  Artificial aptamer to IgGh
accggacggagggggctacttactagcctagg

SEQ ID NO: 1592 - DNA, 32 bp, Artificial sequence
  Artificial aptamer to IgGh
accggacgtgtgttagaggaggaggtaaggta

SEQ ID NO: 1593 - DNA, 32 bp, Artificial sequence
  Artificial aptamer to IgGh
accgggcgtatggttaaggaggagggtggggg

SEQ ID NO: 1594 - DNA, 32 bp, Artificial sequence
  Artificial aptamer to IgGh
accggggacaggggtgtgggggaatggggagg

SEQ ID NO: 1595 - DNA, 32 bp, Artificial sequence
  Artificial aptamer to IgGm
acctgcgatgatggaaggagggtggtaaggac

SEQ ID NO: 1596 - DNA, 32 bp, Artificial sequence
  Artificial aptamer to IgGm
acctggggtactccgcagggaactcacaccta

SEQ ID NO: 1597 - DNA, 32 bp, Artificial sequence
  Artificial aptamer to IgGm
accttgggggccagctaaagccgtgctggcac

SEQ ID NO: 1598 - DNA, 32 bp, Artificial sequence
  Artificial aptamer to IgGh
acgatcagtcaggtaactggcgggggttaggg

SEQ ID NO: 1599 - DNA, 32 bp, Artificial sequence
  Artificial aptamer to IgGh
acgcacgtgtttgtgcaaaggccggccgcggt

SEQ ID NO: 1600 - DNA, 32 bp, Artificial sequence
  Artificial aptamer to IgGh
acgcagtgtcataggacggaggttggttaggg

SEQ ID NO: 1601 - DNA, 32 bp, Artificial sequence
  Artificial aptamer to IgGh
acgccgaagtacgggaacgaccatgaaggtca

SEQ ID NO: 1602 - DNA, 32 bp, Artificial sequence
  Artificial aptamer to IgGh
acgcctgaggggttggggtacggtgggggtaa

SEQ ID NO: 1603 - DNA, 32 bp, Artificial sequence
  Artificial aptamer to IgGm
acgcgcagacattccattcgaagatggactgc

SEQ ID NO: 1604 - DNA, 32 bp, Artificial sequence
  Artificial aptamer to IgGh
acggaagcgccagcagcgtatccttccacttc

SEQ ID NO: 1605 - DNA, 32 bp, Artificial sequence
  Artificial aptamer to IgGm
acggacgggggtggtggagatactgcaaaaag

SEQ ID NO: 1606 - DNA, 32 bp, Artificial sequence
  Artificial aptamer to IgGh
acggcaaaagtatgaaaggagaggtggcggcg

SEQ ID NO: 1607 - DNA, 32 bp, Artificial sequence
  Artificial aptamer to IgGh
acggctgatggcacacgcaccgatgccgccga

SEQ ID NO: 1608 - DNA, 32 bp, Artificial sequence
  Artificial aptamer to IgGm
acgggcggggggggttatgtaggaatttcgga

SEQ ID NO: 1609 - DNA, 32 bp, Artificial sequence
  Artificial aptamer to IgGh
acgggctacagacactcaggaggaaggaaggc

SEQ ID NO: 1610 - DNA, 32 bp, Artificial sequence
  Artificial aptamer to IgGh
acgggctgggggggggttattattttcacgca

SEQ ID NO: 1611 - DNA, 32 bp, Artificial sequence
  Artificial aptamer to IgGm
acggggattactgatttgtggtggtggaggca

SEQ ID NO: 1612 - DNA, 32 bp, Artificial sequence
  Artificial aptamer to IgGh
acgggggcggatgggtttacatgacttggcat

SEQ ID NO: 1613 - DNA, 32 bp, Artificial sequence
  Artificial aptamer to IgGh
acgggtagaacctgtccgctactggcggatta

SEQ ID NO: 1614 - DNA, 32 bp, Artificial sequence
  Artificial aptamer to IgGm
acggtggaaatccggctttcggaaagtaccgg

SEQ ID NO: 1615 - DNA, 32 bp, Artificial sequence
  Artificial aptamer to IgGh
acgtaagaacggggcaaacccgcgttcagtgc

SEQ ID NO: 1616 - DNA, 32 bp, Artificial sequence
  Artificial aptamer to IgGm
actaaatagacgttgggcgccaacgtgaacct

SEQ ID NO: 1617 - DNA, 32 bp, Artificial sequence
  Artificial aptamer to IgGm
actgccacagtgatgtggaagagcgacttgcg

SEQ ID NO: 1618 - DNA, 32 bp, Artificial sequence
  Artificial aptamer to IgGh
acttgcgcgtcagaaagacgtggaagggcaaa

SEQ ID NO: 1619 - DNA, 32 bp, Artificial sequence
  Artificial aptamer to IgGh
agaaacctgtggcgttggagcggaggtgggga

SEQ ID NO: 1620 - DNA, 32 bp, Artificial sequence
  Artificial aptamer to IgGm
agacatagtaacggtggcggtggagcacgctg

SEQ ID NO: 1621 - DNA, 32 bp, Artificial sequence
  Artificial aptamer to IgGm
agacgctcataccgcggacgacacacgtgcgg

SEQ ID NO: 1622 - DNA, 32 bp, Artificial sequence
  Artificial aptamer to IgGh
agactggcggttaggtggtggggcttcggcta

SEQ ID NO: 1623 - DNA, 32 bp, Artificial sequence
  Artificial aptamer to IgGm
agatacgacacgtagctcgcctagacaggcgg

SEQ ID NO: 1624 - DNA, 32 bp, Artificial sequence
  Artificial aptamer to IgGh
agcacaaaatgaattcagggaggaaggtggca

SEQ ID NO: 1625 - DNA, 32 bp, Artificial sequence
  Artificial aptamer to IgGh
agcagtgcgatctgatagatcgcgaaaccgtc

SEQ ID NO: 1626 - DNA, 32 bp, Artificial sequence
  Artificial aptamer to IgGm
agcatcgtggcagcggcacacccgtgcccaat

SEQ ID NO: 1627 - DNA, 32 bp, Artificial sequence
  Artificial aptamer to IgGh
agcgggcaaagggggacaggggggcggggtga

SEQ ID NO: 1628 - DNA, 32 bp, Artificial sequence
  Artificial aptamer to IgGh
aggaaaaaacaaagtggcatggcgggggtggt

SEQ ID NO: 1629 - DNA, 32 bp, Artificial sequence
  Artificial aptamer to IgGm
aggacaaatagtcataggtgggtggttagggt

SEQ ID NO: 1630 - DNA, 32 bp, Artificial sequence
  Artificial aptamer to IgGm
aggaggcttggttagcgctaccccaagccgaa

SEQ ID NO: 1631 - DNA, 32 bp, Artificial sequence
  Artificial aptamer to IgGh
aggagggggcacgggaggccgcaactaggaag

SEQ ID NO: 1632 - DNA, 32 bp, Artificial sequence
  Artificial aptamer to IgGm
aggaggggtggcatgaggctggaggtgggggc

SEQ ID NO: 1633 - DNA, 32 bp, Artificial sequence
  Artificial aptamer to IgGh
aggcagggctggaggcggctacgatttcgtac

SEQ ID NO: 1634 - DNA, 32 bp, Artificial sequence
  Artificial aptamer to IgGh
agggacaagaatcttacggagggtggtggggg

SEQ ID NO: 1635 - DNA, 32 bp, Artificial sequence
  Artificial aptamer to IgGh
agggacggtcggtggcgtaggctcccaggaac

SEQ ID NO: 1636 - DNA, 32 bp, Artificial sequence
  Artificial aptamer to IgGh
agggagggaagtcgatatggggcaagggagca

SEQ ID NO: 1637 - DNA, 32 bp, Artificial sequence
  Artificial aptamer to IgGm
agggcggtggaggatgccgaatttctcaagac

SEQ ID NO: 1638 - DNA, 32 bp, Artificial sequence
  Artificial aptamer to IgGh
aggggggtgggggttcggagtgtagtttgaag

SEQ ID NO: 1639 - DNA, 32 bp, Artificial sequence
  Artificial aptamer to IgGh
agggtgggaagacatgtatgggtggtggatgg

SEQ ID NO: 1640 - DNA, 32 bp, Artificial sequence
  Artificial aptamer to IgGh
aggtgggtggccggatcgcttcataatcgtgc

SEQ ID NO: 1641 - DNA, 32 bp, Artificial sequence
  Artificial aptamer to IgGm
agtaaaggtggtggcggcatgagtaggaaaag

SEQ ID NO: 1642 - DNA, 32 bp, Artificial sequence
  Artificial aptamer to IgGm
agtagggggaggtggctttaatcagaatcagc

SEQ ID NO: 1643 - DNA, 32 bp, Artificial sequence
  Artificial aptamer to IgGm
ataatagcgggcaggaggacgggccgcacatt

SEQ ID NO: 1644 - DNA, 32 bp, Artificial sequence
  Artificial aptamer to IgGm
ataggcgcccgcttaatggcggggatagttac

SEQ ID NO: 1645 - DNA, 32 bp, Artificial sequence
  Artificial aptamer to IgGh
atcacgtgcgattgaacttcaatccacgctgg

SEQ ID NO: 1646 - DNA, 32 bp, Artificial sequence
  Artificial aptamer to IgGm
atcccaaggcggtggttggggtaacgatgttt

SEQ ID NO: 1647 - DNA, 32 bp, Artificial sequence
  Artificial aptamer to IgGm
atccgcgtcgggttactccctacccgataaat

SEQ ID NO: 1648 - DNA, 32 bp, Artificial sequence
  Artificial aptamer to IgGh
atctatgttcggatggcggagggtgacacgac

SEQ ID NO: 1649 - DNA, 32 bp, Artificial sequence
  Artificial aptamer to IgGh
atctgagttcgctcgggccgcgcccgacggac

SEQ ID NO: 1650 - DNA, 32 bp, Artificial sequence
  Artificial aptamer to IgGm
atctgcgccgtcggagagacggtgtacttgta

SEQ ID NO: 1651 - DNA, 32 bp, Artificial sequence
  Artificial aptamer to IgGm
atgcgggagaggggccggtcggtaggtgggaa

SEQ ID NO: 1652 - DNA, 32 bp, Artificial sequence
  Artificial aptamer to IgGh
atgcggtcacgcaggacttcgcgttttgcgtt

SEQ ID NO: 1653 - DNA, 32 bp, Artificial sequence
  Artificial aptamer to IgGh
atgggaggcgggcggtcaaccgaacacatttc

SEQ ID NO: 1654 - DNA, 32 bp, Artificial sequence
  Artificial aptamer to IgGm
atgggtgaaggcccataccggttccatcaacc

SEQ ID NO: 1655 - DNA, 32 bp, Artificial sequence
  Artificial aptamer to IgGh
attccactggggcgccgttgcgccagtatcga

SEQ ID NO: 1656 - DNA, 32 bp, Artificial sequence
  Artificial aptamer to IgGh
attcggggcaggggggtggtagcgtccaatca

SEQ ID NO: 1657 - DNA, 32 bp, Artificial sequence
  Artificial aptamer to IgGh
caaactagggtcgggggtggacgcgccattac

SEQ ID NO: 1658 - DNA, 32 bp, Artificial sequence
  Artificial aptamer to IgGh
caaagagttcgggcacgcacgtgccgaaccgg

SEQ ID NO: 1659 - DNA, 32 bp, Artificial sequence
  Artificial aptamer to IgGm
caaagcggaacctgctgtgttagcgtagccgc

SEQ ID NO: 1660 - DNA, 32 bp, Artificial sequence
  Artificial aptamer to IgGh
caaagggggcggctgggtccattatcccctct

SEQ ID NO: 1661 - DNA, 32 bp, Artificial sequence
  Artificial aptamer to IgGm
caaataccgcgttaggaggggggaggggcaag

SEQ ID NO: 1662 - DNA, 32 bp, Artificial sequence
  Artificial aptamer to IgGm
caacacagaacgtttagtaggagggggcggtg

SEQ ID NO: 1663 - DNA, 32 bp, Artificial sequence
  Artificial aptamer to IgGm
caacacatgtgttgaagcctccggcctcggcc

SEQ ID NO: 1664 - DNA, 32 bp, Artificial sequence
  Artificial aptamer to IgGh
caacatgcaatggcacggatggtacggaggtg

SEQ ID NO: 1665 - DNA, 32 bp, Artificial sequence
  Artificial aptamer to IgGm
caaccgcgccgtgaatgacggtcaaaacgtgg

SEQ ID NO: 1666 - DNA, 32 bp, Artificial sequence
  Artificial aptamer to IgGh
caacgatacattcttcaggtaggtggttggcg

SEQ ID NO: 1667 - DNA, 32 bp, Artificial sequence
  Artificial aptamer to IgGm
caacggtataatcatgttctagtccgaacatg

SEQ ID NO: 1668 - DNA, 32 bp, Artificial sequence
  Artificial aptamer to IgGh
caacgtatgcggggctagtacagccctgccca

SEQ ID NO: 1669 - DNA, 32 bp, Artificial sequence
  Artificial aptamer to IgGh
caactaggctccaagcccaggcggggcttcct

SEQ ID NO: 1670 - DNA, 32 bp, Artificial sequence
  Artificial aptamer to IgGm
caagaaacgcagagaggagattccctttgcgt

SEQ ID NO: 1671 - DNA, 32 bp, Artificial sequence
  Artificial aptamer to IgGm
caagacgatacagggatggcgggagggcttac

SEQ ID NO: 1672 - DNA, 32 bp, Artificial sequence
  Artificial aptamer to IgGm
caagagtagttaattttactactgtcttgaaa

SEQ ID NO: 1673 - DNA, 32 bp, Artificial sequence
  Artificial aptamer to IgGm
caagatagcgaagcccctagtgggggcccatc

SEQ ID NO: 1674 - DNA, 32 bp, Artificial sequence
  Artificial aptamer to IgGm
caagcacggtgcagagctactggtggtagcta

SEQ ID NO: 1675 - DNA, 32 bp, Artificial sequence
  Artificial aptamer to IgGh
caagcccaaaatcgttccagggggaggtgagg

SEQ ID NO: 1676 - DNA, 32 bp, Artificial sequence
  Artificial aptamer to IgGm
caagcgaacgctatcgttctgctgaattgact

SEQ ID NO: 1677 - DNA, 32 bp, Artificial sequence
  Artificial aptamer to IgGm
caagggaggttgggtggggatagttaagtaga

SEQ ID NO: 1678 - DNA, 32 bp, Artificial sequence
  Artificial aptamer to IgGh
caagggggagggatcaaaccgggggcatgggg

SEQ ID NO: 1679 - DNA, 32 bp, Artificial sequence
  Artificial aptamer to IgGh
caagtaatcacggtgggttggaggaagacgtg

SEQ ID NO: 1680 - DNA, 32 bp, Artificial sequence
  Artificial aptamer to IgGm
caagttggaggaggcggcattgcgtgaatgaa

SEQ ID NO: 1681 - DNA, 32 bp, Artificial sequence
  Artificial aptamer to IgGh
caataaggacggtggccggtaactagggatat

SEQ ID NO: 1682 - DNA, 32 bp, Artificial sequence
  Artificial aptamer to IgGh
caatattacctcatgatggcatgaggttttcg

SEQ ID NO: 1683 - DNA, 32 bp, Artificial sequence
  Artificial aptamer to IgGh
caatattgaaggtggtggatgggagatgaaaa

SEQ ID NO: 1684 - DNA, 32 bp, Artificial sequence
  Artificial aptamer to IgGh
caatcaaagtccgctaggctggtggaggggta

SEQ ID NO: 1685 - DNA, 32 bp, Artificial sequence
  Artificial aptamer to IgGm
caatgcgtgtaaagacccaccacacgcatacg

SEQ ID NO: 1686 - DNA, 32 bp, Artificial sequence
  Artificial aptamer to IgGh
caatgggggtggaaggcatggctggattctgt

SEQ ID NO: 1687 - DNA, 32 bp, Artificial sequence
  Artificial aptamer to IgGm
caatgtgggggctggggggggaaggaacgaaa

SEQ ID NO: 1688 - DNA, 32 bp, Artificial sequence
  Artificial aptamer to IgGh
caattatcaaagggggaggtggaaactatgca

SEQ ID NO: 1689 - DNA, 32 bp, Artificial sequence
  Artificial aptamer to IgGm
cacaaaagcgtgggacgcacgcacgtacaacc

SEQ ID NO: 1690 - DNA, 32 bp, Artificial sequence
  Artificial aptamer to IgGh
cacaaagtagaattacgggggaggtcggccga

SEQ ID NO: 1691 - DNA, 32 bp, Artificial sequence
  Artificial aptamer to IgGm
cacaattctaggatgggggaggtactacagcg

SEQ ID NO: 1692 - DNA, 32 bp, Artificial sequence
  Artificial aptamer to IgGm
cacacccagttttatatgggtggtacagttac

SEQ ID NO: 1693 - DNA, 32 bp, Artificial sequence
  Artificial aptamer to IgGh
cacagaaaggttagggagggagagggaccggg

SEQ ID NO: 1694 - DNA, 32 bp, Artificial sequence
  Artificial aptamer to IgGm
cacagaccaatttgtgagcgcttctcgcttgg

SEQ ID NO: 1695 - DNA, 32 bp, Artificial sequence
  Artificial aptamer to IgGh
cacagggcggcggagcgggcatcacaaggatt

SEQ ID NO: 1696 - DNA, 32 bp, Artificial sequence
  Artificial aptamer to IgGm
cacaggggtttggaaggaggaaaggtgtaatg

SEQ ID NO: 1697 - DNA, 32 bp, Artificial sequence
  Artificial aptamer to IgGm
cacattaacgcaatcctgggatggggggggaa

SEQ ID NO: 1698 - DNA, 32 bp, Artificial sequence
  Artificial aptamer to IgGh
caccagtttgagcggccgcgctttcactggat

SEQ ID NO: 1699 - DNA, 32 bp, Artificial sequence
  Artificial aptamer to IgGh
caccataatgttgggcacggtgggggttggaa

SEQ ID NO: 1700 - DNA, 32 bp, Artificial sequence
  Artificial aptamer to IgGm
caccattcactggacgagtgttgcactcggaa

SEQ ID NO: 1701 - DNA, 32 bp, Artificial sequence
  Artificial aptamer to IgGm
cacccgagtctttatactcggtggcttggcac

SEQ ID NO: 1702 - DNA, 32 bp, Artificial sequence
  Artificial aptamer to IgGm
cacccggtcggaaatatagatttccgcacaaa

SEQ ID NO: 1703 - DNA, 32 bp, Artificial sequence
  Artificial aptamer to IgGh
caccgggtggtatggcggtttcattaatttat

SEQ ID NO: 1704 - DNA, 32 bp, Artificial sequence
  Artificial aptamer to IgGh
cacctagatgaaaggtccgggggcggatctgg

SEQ ID NO: 1705 - DNA, 32 bp, Artificial sequence
  Artificial aptamer to IgGm
caccttagaagtttgggccgctggcccatggg

SEQ ID NO: 1706 - DNA, 32 bp, Artificial sequence
  Artificial aptamer to IgGm
caccttcccgtaaaggatatcgcgtaagcgac

SEQ ID NO: 1707 - DNA, 32 bp, Artificial sequence
  Artificial aptamer to IgGm
caccttctgataaggttgcattcgatatgcgc

SEQ ID NO: 1708 - DNA, 32 bp, Artificial sequence
  Artificial aptamer to IgGh
cacgaaggagggcggtggtcaagacaccttga

SEQ ID NO: 1709 - DNA, 32 bp, Artificial sequence
  Artificial aptamer to IgGh
cacgaatgaaggacggcggtggttagagcggt

SEQ ID NO: 1710 - DNA, 32 bp, Artificial sequence
  Artificial aptamer to IgGm
cacgacaacgtctgctaatcgtccaagtgtcg

SEQ ID NO: 1711 - DNA, 32 bp, Artificial sequence
  Artificial aptamer to IgGm
cacgaccagcagttacaatgtagctggcgctc

SEQ ID NO: 1712 - DNA, 32 bp, Artificial sequence
  Artificial aptamer to IgGm
cacgacgcgtttaaccaccggtacggcgtgtc

SEQ ID NO: 1713 - DNA, 32 bp, Artificial sequence
  Artificial aptamer to IgGm
cacgactgtatcgggtggtggcggtcatgaac

SEQ ID NO: 1714 - DNA, 32 bp, Artificial sequence
  Artificial aptamer to IgGm
cacgaggacaggaggcggcttgctaaactaac

SEQ ID NO: 1715 - DNA, 32 bp, Artificial sequence
  Artificial aptamer to IgGm
cacgatctgtcgaagttgttcgacattacaac

SEQ ID NO: 1716 - DNA, 32 bp, Artificial sequence
  Artificial aptamer to IgGm
cacgcactacgtgttaccctaacttagggaca

SEQ ID NO: 1717 - DNA, 32 bp, Artificial sequence
  Artificial aptamer to IgGh
cacgcaggattagagtagcagttctaattgcg

SEQ ID NO: 1718 - DNA, 32 bp, Artificial sequence
  Artificial aptamer to IgGm
cacgcgtcggcagccaccagtagtggcaaggt

SEQ ID NO: 1719 - DNA, 32 bp, Artificial sequence
  Artificial aptamer to IgGh
cacggactcccgcagatagaccctgcgtccga

SEQ ID NO: 1720 - DNA, 32 bp, Artificial sequence
  Artificial aptamer to IgGm
cacggagaatatgtccgtttgggctcttcccg

SEQ ID NO: 1721 - DNA, 32 bp, Artificial sequence
  Artificial aptamer to IgGm
cacggcacccttggcggatcggtggaacaatc

SEQ ID NO: 1722 - DNA, 32 bp, Artificial sequence
  Artificial aptamer to IgGm
cacggggcggttcccagagcggtcggaacgct

SEQ ID NO: 1723 - DNA, 32 bp, Artificial sequence
  Artificial aptamer to IgGm
cacggtagtgcttcggacgtcagcgaagacgt

SEQ ID NO: 1724 - DNA, 32 bp, Artificial sequence
  Artificial aptamer to IgGm
cacggtagttccgtggcgcgccaacccgacat

SEQ ID NO: 1725 - DNA, 32 bp, Artificial sequence
  Artificial aptamer to IgGh
cacggtgtagctgaacgtgaacgcgcacgttc

SEQ ID NO: 1726 - DNA, 32 bp, Artificial sequence
  Artificial aptamer to IgGh
cacgtaaaataacagtactggaggcggtggaa

SEQ ID NO: 1727 - DNA, 32 bp, Artificial sequence
  Artificial aptamer to IgGm
cacgtgggggtgggtggacaaagcgtttggac

SEQ ID NO: 1728 - DNA, 32 bp, Artificial sequence
  Artificial aptamer to IgGh
cacgttagggcggaggcctcgggtaacgcttc

SEQ ID NO: 1729 - DNA, 32 bp, Artificial sequence
  Artificial aptamer to IgGm
cacgttgaacgtgagaaatcccggcgcgcggg

SEQ ID NO: 1730 - DNA, 32 bp, Artificial sequence
  Artificial aptamer to IgGh
cacgttttagtcgcaaggagatggtccgtgcg

SEQ ID NO: 1731 - DNA, 32 bp, Artificial sequence
  Artificial aptamer to IgGh
cactacttgatctattcggaggctcggagggg

SEQ ID NO: 1732 - DNA, 32 bp, Artificial sequence
  Artificial aptamer to IgGm
cactcacaatgagtacatcaaaaaagatgtgt

SEQ ID NO: 1733 - DNA, 32 bp, Artificial sequence
  Artificial aptamer to IgGm
cactcacacactaagtgttaacacagagtgat

SEQ ID NO: 1734 - DNA, 32 bp, Artificial sequence
  Artificial aptamer to IgGm
cactcgacggaaaaacgaaaggtggaaggggg

SEQ ID NO: 1735 - DNA, 32 bp, Artificial sequence
  Artificial aptamer to IgGh
cactctatgggtaggggcgtcgggtaagggac

SEQ ID NO: 1736 - DNA, 32 bp, Artificial sequence
  Artificial aptamer to IgGm
cactctgatacagctcactgcgatgacgcagc

SEQ ID NO: 1737 - DNA, 32 bp, Artificial sequence
  Artificial aptamer to IgGm
cactcttggttatccgaccaagccgatctggc

SEQ ID NO: 1738 - DNA, 32 bp, Artificial sequence
  Artificial aptamer to IgGm
cactgggtggaaggggggatgtcctatcgaca

SEQ ID NO: 1739 - DNA, 32 bp, Artificial sequence
  Artificial aptamer to IgGm
cactgttcggctgtgtagccgtatagaggatt

SEQ ID NO: 1740 - DNA, 32 bp, Artificial sequence
  Artificial aptamer to IgGh
cacttaaacggggcaaaacggtggaggtggtt

SEQ ID NO: 1741 - DNA, 32 bp, Artificial sequence
  Artificial aptamer to IgGh
cactttaccccgccggtgacggcgcgccagcg

SEQ ID NO: 1742 - DNA, 32 bp, Artificial sequence
  Artificial aptamer to IgGm
cactttttgtgacgatcactgattcggtgtcg

SEQ ID NO: 1743 - DNA, 32 bp, Artificial sequence
  Artificial aptamer to IgGh
cagaagatgttactccaaggcggggggcgggg

SEQ ID NO: 1744 - DNA, 32 bp, Artificial sequence
  Artificial aptamer to IgGh
cagaaggacgagcggctcggtgacaaagccgc

SEQ ID NO: 1745 - DNA, 32 bp, Artificial sequence
  Artificial aptamer to IgGh
cagaatggcactccgaaggtcggtggaggatg

SEQ ID NO: 1746 - DNA, 32 bp, Artificial sequence
  Artificial aptamer to IgGh
cagacgaatagcgtctgaagggaaataaaaag

SEQ ID NO: 1747 - DNA, 32 bp, Artificial sequence
  Artificial aptamer to IgGm
cagacggggcgtaccgcggagcgctacccgct

SEQ ID NO: 1748 - DNA, 32 bp, Artificial sequence
  Artificial aptamer to IgGh
cagagaggcggtcaggcggcacataaaactgg

SEQ ID NO: 1749 - DNA, 32 bp, Artificial sequence
  Artificial aptamer to IgGm
cagagcacggggccgagcccctgacaccatgc

SEQ ID NO: 1750 - DNA, 32 bp, Artificial sequence
  Artificial aptamer to IgGh
cagaggaggtctcggttggcgggggaactacg

SEQ ID NO: 1751 - DNA, 32 bp, Artificial sequence
  Artificial aptamer to IgGm
cagagtacgcaatctgtaaatgcgtctggttt

SEQ ID NO: 1752 - DNA, 32 bp, Artificial sequence
  Artificial aptamer to IgGh
cagccctgtccgcggttaggtggagggtgagt

SEQ ID NO: 1753 - DNA, 32 bp, Artificial sequence
  Artificial aptamer to IgGm
cagccgctctgacgggtgatactttccaagag

SEQ ID NO: 1754 - DNA, 32 bp, Artificial sequence
  Artificial aptamer to IgGh
cagcgatcatcacttcgacgtaagtgatgggg

SEQ ID NO: 1755 - DNA, 32 bp, Artificial sequence
  Artificial aptamer to IgGm
cagcgggtatactgctttacgataccacgtaa

SEQ ID NO: 1756 - DNA, 32 bp, Artificial sequence
  Artificial aptamer to IgGm
cagcgtgctaccggtggaggaacgacggacgc

SEQ ID NO: 1757 - DNA, 32 bp, Artificial sequence
  Artificial aptamer to IgGm
cagcgtggtacgttacgctgaaaccgcaatta

SEQ ID NO: 1758 - DNA, 32 bp, Artificial sequence
  Artificial aptamer to IgGm
cagcgttcaagtacctcgtactgacacgaggt

SEQ ID NO: 1759 - DNA, 32 bp, Artificial sequence
  Artificial aptamer to IgGh
cagctaagtaaactactaggaggtaggtggga

SEQ ID NO: 1760 - DNA, 32 bp, Artificial sequence
  Artificial aptamer to IgGm
cagctaccggcagcaggataaatgttcctgcg

SEQ ID NO: 1761 - DNA, 32 bp, Artificial sequence
  Artificial aptamer to IgGm
caggaagggcgcacacggagggggtaggaaag

SEQ ID NO: 1762 - DNA, 32 bp, Artificial sequence
  Artificial aptamer to IgGm
caggaggggtggtggtgtgcggttcgctactg

SEQ ID NO: 1763 - DNA, 32 bp, Artificial sequence
  Artificial aptamer to IgGh
caggatatcagttgcgtctcctacgcaagata

SEQ ID NO: 1764 - DNA, 32 bp, Artificial sequence
  Artificial aptamer to IgGh
caggatgctgggccggcaacggctggtctaac

SEQ ID NO: 1765 - DNA, 32 bp, Artificial sequence
  Artificial aptamer to IgGm
caggcgggaaacgagttaatggggggggatgg

SEQ ID NO: 1766 - DNA, 32 bp, Artificial sequence
  Artificial aptamer to IgGh
cagggccggtgggggccgggcaatctacgctc

SEQ ID NO: 1767 - DNA, 32 bp, Artificial sequence
  Artificial aptamer to IgGh
caggggaggaggtgggacagttacgcgatcca

SEQ ID NO: 1768 - DNA, 32 bp, Artificial sequence
  Artificial aptamer to IgGh
caggggagggggcatcaatcgggttgggacta

SEQ ID NO: 1769 - DNA, 32 bp, Artificial sequence
  Artificial aptamer to IgGh
caggggggaggtgggggtacgatgtttgtact

SEQ ID NO: 1770 - DNA, 32 bp, Artificial sequence
  Artificial aptamer to IgGh
caggggggggaaaggagattctcagtagaggt

SEQ ID NO: 1771 - DNA, 32 bp, Artificial sequence
  Artificial aptamer to IgGh
caggggttaggacgggagtaaggtggtggggg

SEQ ID NO: 1772 - DNA, 32 bp, Artificial sequence
  Artificial aptamer to IgGm
cagggtagtcccctgtcactgttaaagacatt

SEQ ID NO: 1773 - DNA, 32 bp, Artificial sequence
  Artificial aptamer to IgGm
cagggtgggtttcgtgggattgaatactgggg

SEQ ID NO: 1774 - DNA, 32 bp, Artificial sequence
  Artificial aptamer to IgGm
caggtaacaaagcccgatttgttgccatactc

SEQ ID NO: 1775 - DNA, 32 bp, Artificial sequence
  Artificial aptamer to IgGm
caggtaagcgacgtagagacatactccgctta

SEQ ID NO: 1776 - DNA, 32 bp, Artificial sequence
  Artificial aptamer to IgGh
caggtaagttgtttagtgtggcacggtggagg

SEQ ID NO: 1777 - DNA, 32 bp, Artificial sequence
  Artificial aptamer to IgGh
caggttctgattatggcggccgggggtatgaa

SEQ ID NO: 1778 - DNA, 32 bp, Artificial sequence
  Artificial aptamer to IgGh
cagtagatatgtgggtaggtggtgtggaggtt

SEQ ID NO: 1779 - DNA, 32 bp, Artificial sequence
  Artificial aptamer to IgGh
cagtatctggagggaggaaggtgggatgtgat

SEQ ID NO: 1780 - DNA, 32 bp, Artificial sequence
  Artificial aptamer to IgGh
cagtggcggcccgctatccctgcagccagggg

SEQ ID NO: 1781 - DNA, 32 bp, Artificial sequence
  Artificial aptamer to IgGm
cagtgggagacccaccgtatactacgtacttt

SEQ ID NO: 1782 - DNA, 32 bp, Artificial sequence
  Artificial aptamer to IgGm
cagtggggtccagtgggtggggtaggacaccg

SEQ ID NO: 1783 - DNA, 32 bp, Artificial sequence
  Artificial aptamer to IgGh
cagtgtccgggaaactgggctggaggaggggc

SEQ ID NO: 1784 - DNA, 32 bp, Artificial sequence
  Artificial aptamer to IgGh
catacacaacagacatggatcggcggaggaaa

SEQ ID NO: 1785 - DNA, 32 bp, Artificial sequence
  Artificial aptamer to IgGh
catacgggggcggcggatcgctcgatattgca

SEQ ID NO: 1786 - DNA, 32 bp, Artificial sequence
  Artificial aptamer to IgGm
catagggtgcctattcggccagccgggcacac

SEQ ID NO: 1787 - DNA, 32 bp, Artificial sequence
  Artificial aptamer to IgGm
catcactccggggccaacgggctacggccttg

SEQ ID NO: 1788 - DNA, 32 bp, Artificial sequence
  Artificial aptamer to IgGm
catcagaacccattagaggaaggtggagggat

SEQ ID NO: 1789 - DNA, 32 bp, Artificial sequence
  Artificial aptamer to IgGm
catccagctacagcggcgccgagcggcggaga

SEQ ID NO: 1790 - DNA, 32 bp, Artificial sequence
  Artificial aptamer to IgGh
catccgtatcatgccgggatacggtgaaaact

SEQ ID NO: 1791 - DNA, 32 bp, Artificial sequence
  Artificial aptamer to IgGm
catcgagtctgacaaaggtcagtctcaattta

SEQ ID NO: 1792 - DNA, 32 bp, Artificial sequence
  Artificial aptamer to IgGh
catcggaggaggcggggtgggcacgagatagg

SEQ ID NO: 1793 - DNA, 32 bp, Artificial sequence
  Artificial aptamer to IgGh
catcggtatgggggtggctacgatcctccgtt

SEQ ID NO: 1794 - DNA, 32 bp, Artificial sequence
  Artificial aptamer to IgGm
catctaggaggtggacggaatatacctgtcaa

SEQ ID NO: 1795 - DNA, 32 bp, Artificial sequence
  Artificial aptamer to IgGh
catctaggggcatcggtcccctcggggatgac

SEQ ID NO: 1796 - DNA, 32 bp, Artificial sequence
  Artificial aptamer to IgGh
catgagcagaaaatggtggtgggtgggaatct

SEQ ID NO: 1797 - DNA, 32 bp, Artificial sequence
  Artificial aptamer to IgGh
catggacgatcatgacgacatgagtcgttggc

SEQ ID NO: 1798 - DNA, 32 bp, Artificial sequence
  Artificial aptamer to IgGh
catggatggtgggggaacatttctgacagttt

SEQ ID NO: 1799 - DNA, 32 bp, Artificial sequence
  Artificial aptamer to IgGm
catgggcgatggaggaaggcggaacccaatgg

SEQ ID NO: 1800 - DNA, 32 bp, Artificial sequence
  Artificial aptamer to IgGh
catgggggatggagggtagtgcaacaggcaac

SEQ ID NO: 1801 - DNA, 32 bp, Artificial sequence
  Artificial aptamer to IgGh
catgggtctgagagacagaccgaggagggccc

SEQ ID NO: 1802 - DNA, 32 bp, Artificial sequence
  Artificial aptamer to IgGh
catgttatcgtgtgtgggaggatagggggttt

SEQ ID NO: 1803 - DNA, 32 bp, Artificial sequence
  Artificial aptamer to IgGm
catgttctgttaggggggatggtgggtagaag

SEQ ID NO: 1804 - DNA, 32 bp, Artificial sequence
  Artificial aptamer to IgGm
cattagcccgacactattcgggataaaggaac

SEQ ID NO: 1805 - DNA, 32 bp, Artificial sequence
  Artificial aptamer to IgGh
cattatcaggacggaggaagggacaggggccg

SEQ ID NO: 1806 - DNA, 32 bp, Artificial sequence
  Artificial aptamer to IgGm
cattggctgggtgggggacgtcgagtagattg

SEQ ID NO: 1807 - DNA, 32 bp, Artificial sequence
  Artificial aptamer to IgGh
ccaaacaaaccaagcggcggtcggctggcatc

SEQ ID NO: 1808 - DNA, 32 bp, Artificial sequence
  Artificial aptamer to IgGh
ccaaaggtgtgaggaagggggaggttttgaat

SEQ ID NO: 1809 - DNA, 32 bp, Artificial sequence
  Artificial aptamer to IgGm
ccaaagtcctctttatcaagaggttctacttt

SEQ ID NO: 1810 - DNA, 32 bp, Artificial sequence
  Artificial aptamer to IgGh
ccaacatctaatggagggggtggattgattga

SEQ ID NO: 1811 - DNA, 32 bp, Artificial sequence
  Artificial aptamer to IgGm
ccaacggaacgcgttggagatgaagataatgc

SEQ ID NO: 1812 - DNA, 32 bp, Artificial sequence
  Artificial aptamer to IgGm
ccaacgtcacggacacgtggagttcatagaac

SEQ ID NO: 1813 - DNA, 32 bp, Artificial sequence
  Artificial aptamer to IgGm
ccaacgtgaccgacctttgtactcccaaaggt

SEQ ID NO: 1814 - DNA, 32 bp, Artificial sequence
  Artificial aptamer to IgGh
ccaacgttacgtttccaggttcctcctggggt

SEQ ID NO: 1815 - DNA, 32 bp, Artificial sequence
  Artificial aptamer to IgGm
ccaagcaccgagggacggtgaacgctgcggcc

SEQ ID NO: 1816 - DNA, 32 bp, Artificial sequence
  Artificial aptamer to IgGh
ccaagtacctattcggcggatgggcggtaagt

SEQ ID NO: 1817 - DNA, 32 bp, Artificial sequence
  Artificial aptamer to IgGm
ccaagtgtataggttaagagggggagtggtgg

SEQ ID NO: 1818 - DNA, 32 bp, Artificial sequence
  Artificial aptamer to IgGm
ccaatggggacgggacggcaatgatcccgcgt

SEQ ID NO: 1819 - DNA, 32 bp, Artificial sequence
  Artificial aptamer to IgGm
ccaattgggggaccggaaacagatccgggggc

SEQ ID NO: 1820 - DNA, 32 bp, Artificial sequence
  Artificial aptamer to IgGh
ccacaagggttgatgcggtggtggcggctttg

SEQ ID NO: 1821 - DNA, 32 bp, Artificial sequence
  Artificial aptamer to IgGh
ccacagataggatgggggacggatcctggatg

SEQ ID NO: 1822 - DNA, 32 bp, Artificial sequence
  Artificial aptamer to IgGm
ccaccaccataggatcggaggaggagttgttt

SEQ ID NO: 1823 - DNA, 32 bp, Artificial sequence
  Artificial aptamer to IgGm
ccaccgagcgatatcaacgctcgcggttgtta

SEQ ID NO: 1824 - DNA, 32 bp, Artificial sequence
  Artificial aptamer to IgGm
ccaccgttcacggtgttgcggtcatgaaccaa

SEQ ID NO: 1825 - DNA, 32 bp, Artificial sequence
  Artificial aptamer to IgGh
ccacgatgcttggattcgggcggcggtctggg

SEQ ID NO: 1826 - DNA, 32 bp, Artificial sequence
  Artificial aptamer to IgGm
ccacgattgcgttctcccgacgccgtggaacg

SEQ ID NO: 1827 - DNA, 32 bp, Artificial sequence
  Artificial aptamer to IgGh
ccacggatgcacaaaaacggttgggggagggc

SEQ ID NO: 1828 - DNA, 32 bp, Artificial sequence
  Artificial aptamer to IgGh
ccagaaacttgagggggtgggggcaagagagg

SEQ ID NO: 1829 - DNA, 32 bp, Artificial sequence
  Artificial aptamer to IgGm
ccagagaactggtcgtagcacctacggttaca

SEQ ID NO: 1830 - DNA, 32 bp, Artificial sequence
  Artificial aptamer to IgGm
ccagagaatacggctctggcggtggcctgacc

SEQ ID NO: 1831 - DNA, 32 bp, Artificial sequence
  Artificial aptamer to IgGm
ccagagggtcaggaggggggcctcttaagcaa

SEQ ID NO: 1832 - DNA, 32 bp, Artificial sequence
  Artificial aptamer to IgGh
ccagatgtcagagacgggggaggcgggtagga

SEQ ID NO: 1833 - DNA, 32 bp, Artificial sequence
  Artificial aptamer to IgGh
ccagcaaggttgaacaaaccagctgggggtcg

SEQ ID NO: 1834 - DNA, 32 bp, Artificial sequence
  Artificial aptamer to IgGh
ccagcaagttgcgcatgctactatgcgctccg

SEQ ID NO: 1835 - DNA, 32 bp, Artificial sequence
  Artificial aptamer to IgGm
ccagcggatagctgggaattcaaccgtaacga

SEQ ID NO: 1836 - DNA, 32 bp, Artificial sequence
  Artificial aptamer to IgGh
ccaggcagtccggatcacccggaccgcaatct

SEQ ID NO: 1837 - DNA, 32 bp, Artificial sequence
  Artificial aptamer to IgGh
ccaggctgtactttacatcggagtgggggagg

SEQ ID NO: 1838 - DNA, 32 bp, Artificial sequence
  Artificial aptamer to IgGm
ccaggtggagacaaacccacctgcgaagctct

SEQ ID NO: 1839 - DNA, 32 bp, Artificial sequence
  Artificial aptamer to IgGm
ccaggttactggaaaggtgaggatacagctgc

SEQ ID NO: 1840 - DNA, 32 bp, Artificial sequence
  Artificial aptamer to IgGm
ccaggttggatgggggcaatacaacgtgaacc

SEQ ID NO: 1841 - DNA, 32 bp, Artificial sequence
  Artificial aptamer to IgGh
ccataccagggcctgcccctggtcctgaggat

SEQ ID NO: 1842 - DNA, 32 bp, Artificial sequence
  Artificial aptamer to IgGm
ccatcgtcccacccgtgtcgggtgtagcctct

SEQ ID NO: 1843 - DNA, 32 bp, Artificial sequence
  Artificial aptamer to IgGh
ccatctgagtgaaccggcggtggaagggggag

SEQ ID NO: 1844 - DNA, 32 bp, Artificial sequence
  Artificial aptamer to IgGm
ccatggggggttagggggaccgaccaatgtat

SEQ ID NO: 1845 - DNA, 32 bp, Artificial sequence
  Artificial aptamer to IgGh
ccatgtccctttttactttgacatggacgcgg

SEQ ID NO: 1846 - DNA, 32 bp, Artificial sequence
  Artificial aptamer to IgGm
ccatttaaatgggcagattggatattctgcgg

SEQ ID NO: 1847 - DNA, 32 bp, Artificial sequence
  Artificial aptamer to IgGm
cccaaacggaaacgcgcttggtagcgtttatg

SEQ ID NO: 1848 - DNA, 32 bp, Artificial sequence
  Artificial aptamer to IgGm
cccaaccggaagataacccgggcggtcggtgg

SEQ ID NO: 1849 - DNA, 32 bp, Artificial sequence
  Artificial aptamer to IgGm
cccaactcccgtgcgttggacgattcatcgtg

SEQ ID NO: 1850 - DNA, 32 bp, Artificial sequence
  Artificial aptamer to IgGm
cccaagaacgctgtgtttacgttctctcgtgg

SEQ ID NO: 1851 - DNA, 32 bp, Artificial sequence
  Artificial aptamer to IgGh
cccaattacgtggggtggtctacgaccatgaa

SEQ ID NO: 1852 - DNA, 32 bp, Artificial sequence
  Artificial aptamer to IgGm
cccacggaatctgctttacattcttccgtgac

SEQ ID NO: 1853 - DNA, 32 bp, Artificial sequence
  Artificial aptamer to IgGm
cccactagttgtgttcgcgaaatcgacgcgtt

SEQ ID NO: 1854 - DNA, 32 bp, Artificial sequence
  Artificial aptamer to IgGm
cccactcatccgagccctgcgctttgcgcggt

SEQ ID NO: 1855 - DNA, 32 bp, Artificial sequence
  Artificial aptamer to IgGm
cccactgttcaaacggtgggtgacttcacatg

SEQ ID NO: 1856 - DNA, 32 bp, Artificial sequence
  Artificial aptamer to IgGh
cccagccatggagtgcatcatggctaaatatt

SEQ ID NO: 1857 - DNA, 32 bp, Artificial sequence
  Artificial aptamer to IgGm
cccaggttctccctgtgaagtcctccttcatc

SEQ ID NO: 1858 - DNA, 32 bp, Artificial sequence
  Artificial aptamer to IgGm
cccataatcatgggatctcaggaacttttcct

SEQ ID NO: 1859 - DNA, 32 bp, Artificial sequence
  Artificial aptamer to IgGm
cccataccatgggtggtctcggcatcacgagg

SEQ ID NO: 1860 - DNA, 32 bp, Artificial sequence
  Artificial aptamer to IgGh
cccatcggaggagggtgggaagcctgcgttat

SEQ ID NO: 1861 - DNA, 32 bp, Artificial sequence
  Artificial aptamer to IgGm
cccatggacgacaacatccaacgtccaactga

SEQ ID NO: 1862 - DNA, 32 bp, Artificial sequence
  Artificial aptamer to IgGh
ccccaatttacaaagccagtagtaaactggct

SEQ ID NO: 1863 - DNA, 32 bp, Artificial sequence
  Artificial aptamer to IgGm
ccccatttcgcggtttgcggtaaatcaagggg

SEQ ID NO: 1864 - DNA, 32 bp, Artificial sequence
  Artificial aptamer to IgGm
ccccccgcggaatcaaacgcggacaactagtg

SEQ ID NO: 1865 - DNA, 32 bp, Artificial sequence
  Artificial aptamer to IgGh
ccccccgtcgcccgtccacaaatggacgagca

SEQ ID NO: 1866 - DNA, 32 bp, Artificial sequence
  Artificial aptamer to IgGh
ccccgaaataaccggaggtggtggtaacaaag

SEQ ID NO: 1867 - DNA, 32 bp, Artificial sequence
  Artificial aptamer to IgGm
ccccgcgagaatatccaaactcgcgaatcacc

SEQ ID NO: 1868 - DNA, 32 bp, Artificial sequence
  Artificial aptamer to IgGm
ccccgcgtggtgatacggggaaaccgctaaac

SEQ ID NO: 1869 - DNA, 32 bp, Artificial sequence
  Artificial aptamer to IgGm
ccccgtaaaggtctggtacgcagttacggtca

SEQ ID NO: 1870 - DNA, 32 bp, Artificial sequence
  Artificial aptamer to IgGm
cccctacctcggcaacgagtgactttcactcg

SEQ ID NO: 1871 - DNA, 32 bp, Artificial sequence
  Artificial aptamer to IgGm
cccctcccggcattaaatgccggcgctttgtg

SEQ ID NO: 1872 - DNA, 32 bp, Artificial sequence
  Artificial aptamer to IgGm
cccctgacgtaaaggcaatggcggaggaacgc

SEQ ID NO: 1873 - DNA, 32 bp, Artificial sequence
  Artificial aptamer to IgGm
cccgaaggtacagggtgcggatcgcactgggt

SEQ ID NO: 1874 - DNA, 32 bp, Artificial sequence
  Artificial aptamer to IgGm
cccgatcagacgggtatgccctgcacttgggg

SEQ ID NO: 1875 - DNA, 32 bp, Artificial sequence
  Artificial aptamer to IgGh
cccgatcctcgggggtcgattggactccacga

SEQ ID NO: 1876 - DNA, 32 bp, Artificial sequence
  Artificial aptamer to IgGh
cccgatgtcgccggacagtcgggagaaaacct

SEQ ID NO: 1877 - DNA, 32 bp, Artificial sequence
  Artificial aptamer to IgGm
cccgcaaactatgcaccaagggcaatccttga

SEQ ID NO: 1878 - DNA, 32 bp, Artificial sequence
  Artificial aptamer to IgGm
cccgcgatggcatcaatggagggggtggtcgc

SEQ ID NO: 1879 - DNA, 32 bp, Artificial sequence
  Artificial aptamer to IgGm
cccgcgggggtagtctctcctttcggtaggag

SEQ ID NO: 1880 - DNA, 32 bp, Artificial sequence
  Artificial aptamer to IgGm
cccgcgtggggacacctctcaccgtccgcggg

SEQ ID NO: 1881 - DNA, 32 bp, Artificial sequence
  Artificial aptamer to IgGm
cccggaggaggcggatgcttttcatgaagggg

SEQ ID NO: 1882 - DNA, 32 bp, Artificial sequence
  Artificial aptamer to IgGh
cccggagggagggtcccactacgtttccggac

SEQ ID NO: 1883 - DNA, 32 bp, Artificial sequence
  Artificial aptamer to IgGm
cccggcgggggcaggtgtcacaacgggtatta

SEQ ID NO: 1884 - DNA, 32 bp, Artificial sequence
  Artificial aptamer to IgGh
cccggcttggaaagccgcgattctgctcgaaa

SEQ ID NO: 1885 - DNA, 32 bp, Artificial sequence
  Artificial aptamer to IgGm
cccggtaaatggaagtagcgcttccagggtta

SEQ ID NO: 1886 - DNA, 32 bp, Artificial sequence
  Artificial aptamer to IgGh
cccggtcgcgcagcgatgacacacattgcgac

SEQ ID NO: 1887 - DNA, 32 bp, Artificial sequence
  Artificial aptamer to IgGh
cccggttcatgtagtccgcaacaaccggggac

SEQ ID NO: 1888 - DNA, 32 bp, Artificial sequence
  Artificial aptamer to IgGm
cccgtagagaggaatggtgggggcttggagaa

SEQ ID NO: 1889 - DNA, 32 bp, Artificial sequence
  Artificial aptamer to IgGh
cccgtagctcagagaggagggacgggatccct

SEQ ID NO: 1890 - DNA, 32 bp, Artificial sequence
  Artificial aptamer to IgGh
cccgtcaatcgggatggcaatgttaatgcatc

SEQ ID NO: 1891 - DNA, 32 bp, Artificial sequence
  Artificial aptamer to IgGm
cccgtgattacgggtaaatcttggactctaag

SEQ ID NO: 1892 - DNA, 32 bp, Artificial sequence
  Artificial aptamer to IgGm
cccgtggcacgggtgaaggatttgtgaccaaa

SEQ ID NO: 1893 - DNA, 32 bp, Artificial sequence
  Artificial aptamer to IgGh
cccgttaaactgcgggatgagctggtctcaac

SEQ ID NO: 1894 - DNA, 32 bp, Artificial sequence
  Artificial aptamer to IgGh
cccgttcggggatcgggtggaagggtatgggt

SEQ ID NO: 1895 - DNA, 32 bp, Artificial sequence
  Artificial aptamer to IgGh
cccgttgaagtacaacgagggaacacacggtt

SEQ ID NO: 1896 - DNA, 32 bp, Artificial sequence
  Artificial aptamer to IgGm
cccgtttgaagcttccggttgtccgaaacggg

SEQ ID NO: 1897 - DNA, 32 bp, Artificial sequence
  Artificial aptamer to IgGm
ccctcaaaagcgcgctactaagaacctcgcgc

SEQ ID NO: 1898 - DNA, 32 bp, Artificial sequence
  Artificial aptamer to IgGm
ccctcaatgggtaaggggcaggcgcccgagta

SEQ ID NO: 1899 - DNA, 32 bp, Artificial sequence
  Artificial aptamer to IgGm
ccctctgcagttcaaaactgcaacatcattcg

SEQ ID NO: 1900 - DNA, 32 bp, Artificial sequence
  Artificial aptamer to IgGh
ccctggaaagattaatggaggaaggaggatag

SEQ ID NO: 1901 - DNA, 32 bp, Artificial sequence
  Artificial aptamer to IgGh
cccttcccctcatggcaggtgggagggtatgc

SEQ ID NO: 1902 - DNA, 32 bp, Artificial sequence
  Artificial aptamer to IgGm
cccttccgcgaccaattcgcggtccgttctgc

SEQ ID NO: 1903 - DNA, 32 bp, Artificial sequence
  Artificial aptamer to IgGh
ccgaaaggaggtggcggttcactggtatgtca

SEQ ID NO: 1904 - DNA, 32 bp, Artificial sequence
  Artificial aptamer to IgGh
ccgaagggcgcgggttggaaggcggcggcggc

SEQ ID NO: 1905 - DNA, 32 bp, Artificial sequence
  Artificial aptamer to IgGh
ccgaatagcgggaaggtgatccttgaccttcc

SEQ ID NO: 1906 - DNA, 32 bp, Artificial sequence
  Artificial aptamer to IgGm
ccgaatcacgccaacggacgagttccgttatt

SEQ ID NO: 1907 - DNA, 32 bp, Artificial sequence
  Artificial aptamer to IgGh
ccgacagctaacattaacgggggcggatgggg

SEQ ID NO: 1908 - DNA, 32 bp, Artificial sequence
  Artificial aptamer to IgGm
ccgacctcccgtgattatcagcttaggtcgga

SEQ ID NO: 1909 - DNA, 32 bp, Artificial sequence
  Artificial aptamer to IgGm
ccgacctgaataggtaacggtgcgagctctcg

SEQ ID NO: 1910 - DNA, 32 bp, Artificial sequence
  Artificial aptamer to IgGm
ccgacgaaatgtcggtaaaacctgatttgagg

SEQ ID NO: 1911 - DNA, 32 bp, Artificial sequence
  Artificial aptamer to IgGh
ccgagaaccgctgttccacgggaggtatcctc

SEQ ID NO: 1912 - DNA, 32 bp, Artificial sequence
  Artificial aptamer to IgGh
ccgagaaggcgagctcggatactttttgtatg

SEQ ID NO: 1913 - DNA, 32 bp, Artificial sequence
  Artificial aptamer to IgGm
ccgagatgcggtcctcggttcaactcagagga

SEQ ID NO: 1914 - DNA, 32 bp, Artificial sequence
  Artificial aptamer to IgGm
ccgagggaggtggcggttgggaattatctaat

SEQ ID NO: 1915 - DNA, 32 bp, Artificial sequence
  Artificial aptamer to IgGh
ccgatacggtggaggtaggagataggcaattg

SEQ ID NO: 1916 - DNA, 32 bp, Artificial sequence
  Artificial aptamer to IgGm
ccgatgctgatagcactcttcggaggacattc

SEQ ID NO: 1917 - DNA, 32 bp, Artificial sequence
  Artificial aptamer to IgGm
ccgcaagagaattgcggttcgttttctatgat

SEQ ID NO: 1918 - DNA, 32 bp, Artificial sequence
  Artificial aptamer to IgGm
ccgcactcaaatattcgattgagtggaaaaag

SEQ ID NO: 1919 - DNA, 32 bp, Artificial sequence
  Artificial aptamer to IgGh
ccgcagtagaacaccaagttgctgcgtaaggc

SEQ ID NO: 1920 - DNA, 32 bp, Artificial sequence
  Artificial aptamer to IgGm
ccgcatactccgagaaggaggttgcctcggac

SEQ ID NO: 1921 - DNA, 32 bp, Artificial sequence
  Artificial aptamer to IgGh
ccgccagttcccccgatgtgtaacgggggctg

SEQ ID NO: 1922 - DNA, 32 bp, Artificial sequence
  Artificial aptamer to IgGm
ccgccatcactcattatgagtgatagttttgt

SEQ ID NO: 1923 - DNA, 32 bp, Artificial sequence
  Artificial aptamer to IgGh
ccgccattttccgaaatgctagacgcggactt

SEQ ID NO: 1924 - DNA, 32 bp, Artificial sequence
  Artificial aptamer to IgGm
ccgcctcccgtcgcgcgggtagattgtctacc

SEQ ID NO: 1925 - DNA, 32 bp, Artificial sequence
  Artificial aptamer to IgGm
ccgcgaaaaaacgtatttttcgaaagactttt

SEQ ID NO: 1926 - DNA, 32 bp, Artificial sequence
  Artificial aptamer to IgGh
ccgcgacgccaaaccgcgactatcgcgtgacg

SEQ ID NO: 1927 - DNA, 32 bp, Artificial sequence
  Artificial aptamer to IgGm
ccgcgatggtgtggggacagagagtctgtcgc

SEQ ID NO: 1928 - DNA, 32 bp, Artificial sequence
  Artificial aptamer to IgGh
ccgcgcgagagcgaataggttgaaggcaaccg

SEQ ID NO: 1929 - DNA, 32 bp, Artificial sequence
  Artificial aptamer to IgGm
ccgcggggatttccgtacggtgctaagaagca

SEQ ID NO: 1930 - DNA, 32 bp, Artificial sequence
  Artificial aptamer to IgGm
ccgctagctgggctatgcggagtgacttttcc

SEQ ID NO: 1931 - DNA, 32 bp, Artificial sequence
  Artificial aptamer to IgGh
ccgctcgaggagcagttgtgacatccacaaca

SEQ ID NO: 1932 - DNA, 32 bp, Artificial sequence
  Artificial aptamer to IgGh
ccgctgatgcctttgacaaacgcccagcggaa

SEQ ID NO: 1933 - DNA, 32 bp, Artificial sequence
  Artificial aptamer to IgGm
ccgctgcatgcgcggggcacccgatggatttc

SEQ ID NO: 1934 - DNA, 32 bp, Artificial sequence
  Artificial aptamer to IgGm
ccggaactaatcggggaatggtccccggatat

SEQ ID NO: 1935 - DNA, 32 bp, Artificial sequence
  Artificial aptamer to IgGm
ccggaagaccctgatcgcaagggttgtccatc

SEQ ID NO: 1936 - DNA, 32 bp, Artificial sequence
  Artificial aptamer to IgGm
ccggagacagagggtaggtaggtgggaaggaa

SEQ ID NO: 1937 - DNA, 32 bp, Artificial sequence
  Artificial aptamer to IgGh
ccggagggggaacggtcaatgccatgaacatt

SEQ ID NO: 1938 - DNA, 32 bp, Artificial sequence
  Artificial aptamer to IgGh
ccggagggggagcgggcaaagtttgcagactg

SEQ ID NO: 1939 - DNA, 32 bp, Artificial sequence
  Artificial aptamer to IgGh
ccggaggtggaggtctcgtggtgatcacactt

SEQ ID NO: 1940 - DNA, 32 bp, Artificial sequence
  Artificial aptamer to IgGh
ccggcacgaacagacgtgcaacccgttaggtc

SEQ ID NO: 1941 - DNA, 32 bp, Artificial sequence
  Artificial aptamer to IgGm
ccggcccggatagcatcatgctatcacctggg

SEQ ID NO: 1942 - DNA, 32 bp, Artificial sequence
  Artificial aptamer to IgGh
ccggccttcgctgttgctggtagtaccagccc

SEQ ID NO: 1943 - DNA, 32 bp, Artificial sequence
  Artificial aptamer to IgGm
ccggcgacggaaaccggacgccagaaaaaacg

SEQ ID NO: 1944 - DNA, 32 bp, Artificial sequence
  Artificial aptamer to IgGm
ccggcgcactgttgcggcgtggggggctgatc

SEQ ID NO: 1945 - DNA, 32 bp, Artificial sequence
  Artificial aptamer to IgGh
ccggcgcagcttactggtggaactcccaccgc

SEQ ID NO: 1946 - DNA, 32 bp, Artificial sequence
  Artificial aptamer to IgGm
ccggcgtgtcaccgtgtccgtgtaggactcaa

SEQ ID NO: 1947 - DNA, 32 bp, Artificial sequence
  Artificial aptamer to IgGm
ccggctacggtagttggaggatggaggtgcgt

SEQ ID NO: 1948 - DNA, 32 bp, Artificial sequence
  Artificial aptamer to IgGm
ccgggagggggggagagaattagggatacgaa

SEQ ID NO: 1949 - DNA, 32 bp, Artificial sequence
  Artificial aptamer to IgGm
ccgggcggatgggggaaaacaacattccaatt

SEQ ID NO: 1950 - DNA, 32 bp, Artificial sequence
  Artificial aptamer to IgGm
ccggggaccgggggagaggggcaagggggatg

SEQ ID NO: 1951 - DNA, 32 bp, Artificial sequence
  Artificial aptamer to IgGm
ccggggaggaggtgggtagcaaaacagaagcg

SEQ ID NO: 1952 - DNA, 32 bp, Artificial sequence
  Artificial aptamer to IgGh
ccggggatttgcgaatccggtggttttcaccc

SEQ ID NO: 1953 - DNA, 32 bp, Artificial sequence
  Artificial aptamer to IgGm
ccgggggaggtagggaattttcaagccgctgg

SEQ ID NO: 1954 - DNA, 32 bp, Artificial sequence
  Artificial aptamer to IgGh
ccgggggggggactggaatttggtatcgatcg

SEQ ID NO: 1955 - DNA, 32 bp, Artificial sequence
  Artificial aptamer to IgGh
ccgggggtttggaggtacttcggtgaaatgct

SEQ ID NO: 1956 - DNA, 32 bp, Artificial sequence
  Artificial aptamer to IgGm
ccggggttgaccggtgacaaaccaatctggtg

SEQ ID NO: 1957 - DNA, 32 bp, Artificial sequence
  Artificial aptamer to IgGh
ccgggtaattaacacaaggcggggggctggac

SEQ ID NO: 1958 - DNA, 32 bp, Artificial sequence
  Artificial aptamer to IgGh
ccgggtatcgggatggtttgtgccatcacagt

SEQ ID NO: 1959 - DNA, 32 bp, Artificial sequence
  Artificial aptamer to IgGm
ccggtaattcattatggaggtggatggagcca

SEQ ID NO: 1960 - DNA, 32 bp, Artificial sequence
  Artificial aptamer to IgGh
ccggtggggggggtattggaaagccctcggga

SEQ ID NO: 1961 - DNA, 32 bp, Artificial sequence
  Artificial aptamer to IgGh
ccggtgtcggcgggggtacggttgtacgaaat

SEQ ID NO: 1962 - DNA, 32 bp, Artificial sequence
  Artificial aptamer to IgGm
ccggtgtgattacggtggaggtccggttgcgc

SEQ ID NO: 1963 - DNA, 32 bp, Artificial sequence
  Artificial aptamer to IgGm
ccgtaccctctgggaacggagaacaatatttc

SEQ ID NO: 1964 - DNA, 32 bp, Artificial sequence
  Artificial aptamer to IgGm
ccgtactgatttcacggaacgatcttgcgttg

SEQ ID NO: 1965 - DNA, 32 bp, Artificial sequence
  Artificial aptamer to IgGh
ccgtagaggtaactggaggtcaggcggacgga

SEQ ID NO: 1966 - DNA, 32 bp, Artificial sequence
  Artificial aptamer to IgGm
ccgtatccggagggtgggggtgtctcgcatac

SEQ ID NO: 1967 - DNA, 32 bp, Artificial sequence
  Artificial aptamer to IgGm
ccgtcgggtggagggggtagtaagacaggtga

SEQ ID NO: 1968 - DNA, 32 bp, Artificial sequence
  Artificial aptamer to IgGh
ccgtgaccagtgcttggtcacaactttgccac

SEQ ID NO: 1969 - DNA, 32 bp, Artificial sequence
  Artificial aptamer to IgGm
ccgtgcggataagctcggcagtcacaagactt

SEQ ID NO: 1970 - DNA, 32 bp, Artificial sequence
  Artificial aptamer to IgGm
ccgtgtgaccggggtgaagccccttattcaca

SEQ ID NO: 1971 - DNA, 32 bp, Artificial sequence
  Artificial aptamer to IgGh
ccgtgtgccgggacgcatttaaggtgcgagat

SEQ ID NO: 1972 - DNA, 32 bp, Artificial sequence
  Artificial aptamer to IgGh
ccgttgaatgcggttaacatcattctgatgtc

SEQ ID NO: 1973 - DNA, 32 bp, Artificial sequence
  Artificial aptamer to IgGh
ccgttgttccgccaacggatgctatttagctc

SEQ ID NO: 1974 - DNA, 32 bp, Artificial sequence
  Artificial aptamer to IgGm
ccgtttggtatcctttggaggcgggggccaat

SEQ ID NO: 1975 - DNA, 32 bp, Artificial sequence
  Artificial aptamer to IgGm
cctaagcataacgtatgatgttgagtcatacg

SEQ ID NO: 1976 - DNA, 32 bp, Artificial sequence
  Artificial aptamer to IgGh
cctaaggaaaaatggaatcggcggtgcggagg

SEQ ID NO: 1977 - DNA, 32 bp, Artificial sequence
  Artificial aptamer to IgGh
cctaaggtggagggtggacttatgcaacaaga

SEQ ID NO: 1978 - DNA, 32 bp, Artificial sequence
  Artificial aptamer to IgGh
cctaaggtggtaagggggagaaaaagataatg

SEQ ID NO: 1979 - DNA, 32 bp, Artificial sequence
  Artificial aptamer to IgGh
cctagagagtattagagttggtggtggagggg

SEQ ID NO: 1980 - DNA, 32 bp, Artificial sequence
  Artificial aptamer to IgGh
cctagattgggggttgaacaggggggcggggg

SEQ ID NO: 1981 - DNA, 32 bp, Artificial sequence
  Artificial aptamer to IgGh
cctagccagcatgggcggaggagggttccaag

SEQ ID NO: 1982 - DNA, 32 bp, Artificial sequence
  Artificial aptamer to IgGh
cctagggggaggtgggtacggaggttagaaca

SEQ ID NO: 1983 - DNA, 32 bp, Artificial sequence
  Artificial aptamer to IgGh
cctcagtgaggttgcgcttcatatcgcaaagt

SEQ ID NO: 1984 - DNA, 32 bp, Artificial sequence
  Artificial aptamer to IgGm
cctcgaaggtaagataatagggtaggaggtgg

SEQ ID NO: 1985 - DNA, 32 bp, Artificial sequence
  Artificial aptamer to IgGm
cctcgataaatggaacgtgaggaaatctcacg

SEQ ID NO: 1986 - DNA, 32 bp, Artificial sequence
  Artificial aptamer to IgGm
cctcgatattgggttaatgacccaagagttca

SEQ ID NO: 1987 - DNA, 32 bp, Artificial sequence
  Artificial aptamer to IgGh
cctcggcgggtaggctcagggtcggagggggt

SEQ ID NO: 1988 - DNA, 32 bp, Artificial sequence
  Artificial aptamer to IgGm
cctcggggggtgggagtggtgccaagaaagca

SEQ ID NO: 1989 - DNA, 32 bp, Artificial sequence
  Artificial aptamer to IgGm
cctcttatttaagaggatgccctcggcagcat

SEQ ID NO: 1990 - DNA, 32 bp, Artificial sequence
  Artificial aptamer to IgGh
cctgaccggagcagatgcctgctcgaacgggt

SEQ ID NO: 1991 - DNA, 32 bp, Artificial sequence
  Artificial aptamer to IgGm
cctgatcggaactaggtccaatagggaccaaa

SEQ ID NO: 1992 - DNA, 32 bp, Artificial sequence
  Artificial aptamer to IgGm
cctgccaggaagtgcacctctactagcactta

SEQ ID NO: 1993 - DNA, 32 bp, Artificial sequence
  Artificial aptamer to IgGh
cctgcgggtgggatggtggcacaatgcacgat

SEQ ID NO: 1994 - DNA, 32 bp, Artificial sequence
  Artificial aptamer to IgGh
cctggaggttggaggcggtgtacggagcataa

SEQ ID NO: 1995 - DNA, 32 bp, Artificial sequence
  Artificial aptamer to IgGh
cctggcggatggtggcgatcaacagtcacccc

SEQ ID NO: 1996 - DNA, 32 bp, Artificial sequence
  Artificial aptamer to IgGh
cctgggggacggtggcccttcacacacgaatg

SEQ ID NO: 1997 - DNA, 32 bp, Artificial sequence
  Artificial aptamer to IgGh
cctgggggttggaagggaacaaagctcccaaa

SEQ ID NO: 1998 - DNA, 32 bp, Artificial sequence
  Artificial aptamer to IgGh
cctgtacgaactcgcgtacaggtagtcggccg

SEQ ID NO: 1999 - DNA, 32 bp, Artificial sequence
  Artificial aptamer to IgGm
cctgttcgactatgcgcaacagggacccgagg

SEQ ID NO: 2000 - DNA, 32 bp, Artificial sequence
  Artificial aptamer to IgGh
ccttaggttatggagtaatcggcaggaggggg

SEQ ID NO: 2001 - DNA, 32 bp, Artificial sequence
  Artificial aptamer to IgGh
ccttcaaaagtccgccacgatggcggatctga

SEQ ID NO: 2002 - DNA, 32 bp, Artificial sequence
  Artificial aptamer to IgGm
ccttcacctcgagggggctccggcggacgccc

SEQ ID NO: 2003 - DNA, 32 bp, Artificial sequence
  Artificial aptamer to IgGm
ccttccgatccagcttaccatcgttgatcgga

SEQ ID NO: 2004 - DNA, 32 bp, Artificial sequence
  Artificial aptamer to IgGh
ccttctcaagataaggacgggcggaggatgga

SEQ ID NO: 2005 - DNA, 32 bp, Artificial sequence
  Artificial aptamer to IgGm
ccttggataggacagaagggtaatcccatctg

SEQ ID NO: 2006 - DNA, 32 bp, Artificial sequence
  Artificial aptamer to IgGh
cctttccccggggaccgggtgtgtcagagaca

SEQ ID NO: 2007 - DNA, 32 bp, Artificial sequence
  Artificial aptamer to IgGh
cctttcgacaagctcgaatcttggtagcaaga

SEQ ID NO: 2008 - DNA, 32 bp, Artificial sequence
  Artificial aptamer to IgGh
cgaaacacaccgaggtggtttggagggaacct

SEQ ID NO: 2009 - DNA, 32 bp, Artificial sequence
  Artificial aptamer to IgGm
cgaaacaggggttggcggaggctactcggtgt

SEQ ID NO: 2010 - DNA, 32 bp, Artificial sequence
  Artificial aptamer to IgGh
cgaaacattgcgtttaggtggggggtgggaaa

SEQ ID NO: 2011 - DNA, 32 bp, Artificial sequence
  Artificial aptamer to IgGh
cgaaaggtggtgggcggaaagacactatgtgg

SEQ ID NO: 2012 - DNA, 32 bp, Artificial sequence
  Artificial aptamer to IgGh
cgaaatcggggggtggccggcacatacttatg

SEQ ID NO: 2013 - DNA, 32 bp, Artificial sequence
  Artificial aptamer to IgGh
cgaacgtaattcggtagctcgatagctatggg

SEQ ID NO: 2014 - DNA, 32 bp, Artificial sequence
  Artificial aptamer to IgGm
cgaaggaatgggacagaccctcacctactcga

SEQ ID NO: 2015 - DNA, 32 bp, Artificial sequence
  Artificial aptamer to IgGh
cgaaggtgtcttaagcgggggaagggtggtgt

SEQ ID NO: 2016 - DNA, 32 bp, Artificial sequence
  Artificial aptamer to IgGh
cgaatcattagaccaggatggaggaggcaaag

SEQ ID NO: 2017 - DNA, 32 bp, Artificial sequence
  Artificial aptamer to IgGh
cgacagcgtataaaacagtgacgctgtggaaa

SEQ ID NO: 2018 - DNA, 32 bp, Artificial sequence
  Artificial aptamer to IgGm
cgacaggagtcagtactccgactgtccagaat

SEQ ID NO: 2019 - DNA, 32 bp, Artificial sequence
  Artificial aptamer to IgGh
cgacataaggcggcgcgcgggttaccggcgtt

SEQ ID NO: 2020 - DNA, 32 bp, Artificial sequence
  Artificial aptamer to IgGm
cgaccaggggggtggtatggagagggaaagta

SEQ ID NO: 2021 - DNA, 32 bp, Artificial sequence
  Artificial aptamer to IgGh
cgaccggcacaccgagacactttcgtgtcaaa

SEQ ID NO: 2022 - DNA, 32 bp, Artificial sequence
  Artificial aptamer to IgGm
cgaccgggtgtagacatgggagggggcgtggt

SEQ ID NO: 2023 - DNA, 32 bp, Artificial sequence
  Artificial aptamer to IgGm
cgaccgtgaggggtttgggggttggaagggtg

SEQ ID NO: 2024 - DNA, 32 bp, Artificial sequence
  Artificial aptamer to IgGm
cgacgggcggacacgctggtctttgaggacaa

SEQ ID NO: 2025 - DNA, 32 bp, Artificial sequence
  Artificial aptamer to IgGh
cgacttgatactgcgcgggtgacgcgcggacc

SEQ ID NO: 2026 - DNA, 32 bp, Artificial sequence
  Artificial aptamer to IgGm
cgacttgcatttggggcgggcggttgggaatg

SEQ ID NO: 2027 - DNA, 32 bp, Artificial sequence
  Artificial aptamer to IgGh
cgagaagggtggacggctggaccaaattttcg

SEQ ID NO: 2028 - DNA, 32 bp, Artificial sequence
  Artificial aptamer to IgGm
cgagataagtggtgtggaggttggttatcttt

SEQ ID NO: 2029 - DNA, 32 bp, Artificial sequence
  Artificial aptamer to IgGm
cgagattgagacaactttcggagggggggcgg

SEQ ID NO: 2030 - DNA, 32 bp, Artificial sequence
  Artificial aptamer to IgGh
cgagcatagggatttacctgcagcgtgctcga

SEQ ID NO: 2031 - DNA, 32 bp, Artificial sequence
  Artificial aptamer to IgGh
cgagcgaacgaacgagacgtatcacgtcttcg

SEQ ID NO: 2032 - DNA, 32 bp, Artificial sequence
  Artificial aptamer to IgGm
cgagcgagcgagtttgagggtcggccccctca

SEQ ID NO: 2033 - DNA, 32 bp, Artificial sequence
  Artificial aptamer to IgGh
cgagctaagagtgccgggaaaaacccgggaca

SEQ ID NO: 2034 - DNA, 32 bp, Artificial sequence
  Artificial aptamer to IgGh
cgagcttgtcgactgctagctcgaacgtctcg

SEQ ID NO: 2035 - DNA, 32 bp, Artificial sequence
  Artificial aptamer to IgGh
cgaggacacaaggccggaggaggtggatgctg

SEQ ID NO: 2036 - DNA, 32 bp, Artificial sequence
  Artificial aptamer to IgGm
cgaggacggttgtggttatcggtggacggggg

SEQ ID NO: 2037 - DNA, 32 bp, Artificial sequence
  Artificial aptamer to IgGm
cgaggcggcgggaggtacctggacctctgata

SEQ ID NO: 2038 - DNA, 32 bp, Artificial sequence
  Artificial aptamer to IgGh
cgaggggcgcggcggtggagaggtaatagaca

SEQ ID NO: 2039 - DNA, 32 bp, Artificial sequence
  Artificial aptamer to IgGh
cgagggtggagggcaggaatggtcatttcgta

SEQ ID NO: 2040 - DNA, 32 bp, Artificial sequence
  Artificial aptamer to IgGh
cgaggtgggggagggaatggatcttgtatgct

SEQ ID NO: 2041 - DNA, 32 bp, Artificial sequence
  Artificial aptamer to IgGh
cgagtgggcaatgggaggtggtgggtggtgaa

SEQ ID NO: 2042 - DNA, 32 bp, Artificial sequence
  Artificial aptamer to IgGh
cgatacaggtttggaggatgggaaaatcgaat

SEQ ID NO: 2043 - DNA, 32 bp, Artificial sequence
  Artificial aptamer to IgGh
cgatacctataggattggaggatggggtaagt

SEQ ID NO: 2044 - DNA, 32 bp, Artificial sequence
  Artificial aptamer to IgGh
cgatagacatggatctcatgtctagtcccaaa

SEQ ID NO: 2045 - DNA, 32 bp, Artificial sequence
  Artificial aptamer to IgGh
cgatatatgggcaatgatatggaggcggacgg

SEQ ID NO: 2046 - DNA, 32 bp, Artificial sequence
  Artificial aptamer to IgGm
cgatgattagtcggggggtggcggttctagca

SEQ ID NO: 2047 - DNA, 32 bp, Artificial sequence
  Artificial aptamer to IgGh
cgatgggaggatgggaggtagcaatgtacgat

SEQ ID NO: 2048 - DNA, 32 bp, Artificial sequence
  Artificial aptamer to IgGh
cgattatcggaccttttaggccggagggtggg

SEQ ID NO: 2049 - DNA, 32 bp, Artificial sequence
  Artificial aptamer to IgGh
cgattgaaagacttaacggcggttcggtgggc

SEQ ID NO: 2050 - DNA, 32 bp, Artificial sequence
  Artificial aptamer to IgGm
cgcaaatctatcaatcgggggaggtggtgacg

SEQ ID NO: 2051 - DNA, 32 bp, Artificial sequence
  Artificial aptamer to IgGm
cgcaaggtcggggctcagcagcccgcgttata

SEQ ID NO: 2052 - DNA, 32 bp, Artificial sequence
  Artificial aptamer to IgGm
cgcaagtagcggcgtataatagacgcaggatt

SEQ ID NO: 2053 - DNA, 32 bp, Artificial sequence
  Artificial aptamer to IgGh
cgcacgaattaaaggatggtgggggcggactt

SEQ ID NO: 2054 - DNA, 32 bp, Artificial sequence
  Artificial aptamer to IgGh
cgcactgctcttcctggggacgggggtggagg

SEQ ID NO: 2055 - DNA, 32 bp, Artificial sequence
  Artificial aptamer to IgGm
cgcactttgaggcaaccgatcctcatgcgtac

SEQ ID NO: 2056 - DNA, 32 bp, Artificial sequence
  Artificial aptamer to IgGm
cgcagataggcccactatcacgggggcggcgg

SEQ ID NO: 2057 - DNA, 32 bp, Artificial sequence
  Artificial aptamer to IgGh
cgcaggaaggcgggggagggctaaatcgaact

SEQ ID NO: 2058 - DNA, 32 bp, Artificial sequence
  Artificial aptamer to IgGh
cgcaggcggtggcaggagcgctcccatctttc

SEQ ID NO: 2059 - DNA, 32 bp, Artificial sequence
  Artificial aptamer to IgGm
cgcagggcgagaactacgttttattacgtaga

SEQ ID NO: 2060 - DNA, 32 bp, Artificial sequence
  Artificial aptamer to IgGh
cgcagggtggtggggtggtccgtgctgattga

SEQ ID NO: 2061 - DNA, 32 bp, Artificial sequence
  Artificial aptamer to IgGh
cgcaggtaggttggaggctcggttggtggcta

SEQ ID NO: 2062 - DNA, 32 bp, Artificial sequence
  Artificial aptamer to IgGm
cgcatacaacagaccgttgtacagtaattgcg

SEQ ID NO: 2063 - DNA, 32 bp, Artificial sequence
  Artificial aptamer to IgGh
cgcatccgggggggggggtaagtatccgggac

SEQ ID NO: 2064 - DNA, 32 bp, Artificial sequence
  Artificial aptamer to IgGm
cgcatgagcgtcaactgtacgtacgttgaggt

SEQ ID NO: 2065 - DNA, 32 bp, Artificial sequence
  Artificial aptamer to IgGh
cgccaatccgatgcaaaatgagcatttggcgt

SEQ ID NO: 2066 - DNA, 32 bp, Artificial sequence
  Artificial aptamer to IgGm
cgccatacagagggggcgtgcagtcctcggca

SEQ ID NO: 2067 - DNA, 32 bp, Artificial sequence
  Artificial aptamer to IgGm
cgccatactgaacatacatggcgagaagggct

SEQ ID NO: 2068 - DNA, 32 bp, Artificial sequence
  Artificial aptamer to IgGm
cgccattcaaccattaattgaatcttaggcgg

SEQ ID NO: 2069 - DNA, 32 bp, Artificial sequence
  Artificial aptamer to IgGm
cgccccagaaagctgggtttcccttgaaacgg

SEQ ID NO: 2070 - DNA, 32 bp, Artificial sequence
  Artificial aptamer to IgGm
cgcccctggcctcggacctccggcactagccg

SEQ ID NO: 2071 - DNA, 32 bp, Artificial sequence
  Artificial aptamer to IgGh
cgccggagggatagcggcgaaacaaggcatcg

SEQ ID NO: 2072 - DNA, 32 bp, Artificial sequence
  Artificial aptamer to IgGm
cgccttatggcgggcaggaatctgttagggac

SEQ ID NO: 2073 - DNA, 32 bp, Artificial sequence
  Artificial aptamer to IgGh
cgcgaaactctctccgcgaaaaggctccggcc

SEQ ID NO: 2074 - DNA, 32 bp, Artificial sequence
  Artificial aptamer to IgGh
cgcgaacctgtaatgcgacagcagaggctgta

SEQ ID NO: 2075 - DNA, 32 bp, Artificial sequence
  Artificial aptamer to IgGm
cgcgaagtagtttcgtcggcaagctgcaaggc

SEQ ID NO: 2076 - DNA, 32 bp, Artificial sequence
  Artificial aptamer to IgGh
cgcgactatagccaatcaggtggcggagggct

SEQ ID NO: 2077 - DNA, 32 bp, Artificial sequence
  Artificial aptamer to IgGm
cgcgatacggttggaggaggtcaatttaatgc

SEQ ID NO: 2078 - DNA, 32 bp, Artificial sequence
  Artificial aptamer to IgGh
cgcgccgagtgactgacatcattgcgcgaact

SEQ ID NO: 2079 - DNA, 32 bp, Artificial sequence
  Artificial aptamer to IgGh
cgcggatgcgtaaggggcgaaagcgcggcctc

SEQ ID NO: 2080 - DNA, 32 bp, Artificial sequence
  Artificial aptamer to IgGh
cgcggcggtcgagttctaaaccgcgggttcgc

SEQ ID NO: 2081 - DNA, 32 bp, Artificial sequence
  Artificial aptamer to IgGm
cgcggctttaccggaacctcgctatggcggcg

SEQ ID NO: 2082 - DNA, 32 bp, Artificial sequence
  Artificial aptamer to IgGh
cgcgggaagacgggggtcggagcagggggggt

SEQ ID NO: 2083 - DNA, 32 bp, Artificial sequence
  Artificial aptamer to IgGm
cgcgggagcgggacattcgctcggagcgggtg

SEQ ID NO: 2084 - DNA, 32 bp, Artificial sequence
  Artificial aptamer to IgGm
cgcgggcggggaggggaatctcgaggggctga

SEQ ID NO: 2085 - DNA, 32 bp, Artificial sequence
  Artificial aptamer to IgGh
cgcgggggagggtaggcctcgaagatatatcg

SEQ ID NO: 2086 - DNA, 32 bp, Artificial sequence
  Artificial aptamer to IgGh
cgcgggtgggggaggtttacggatccgggacc

SEQ ID NO: 2087 - DNA, 32 bp, Artificial sequence
  Artificial aptamer to IgGm
cgcggtagggggacggtgttcaacgtagatac

SEQ ID NO: 2088 - DNA, 32 bp, Artificial sequence
  Artificial aptamer to IgGm
cgcgtagcgaggatggggtgaaatcccctgtg

SEQ ID NO: 2089 - DNA, 32 bp, Artificial sequence
  Artificial aptamer to IgGh
cgcgtctagcatagacgcaaaaatcagcacat

SEQ ID NO: 2090 - DNA, 32 bp, Artificial sequence
  Artificial aptamer to IgGh
cgcgtgcgtcgaaacgcagtagaaatgcgttg

SEQ ID NO: 2091 - DNA, 32 bp, Artificial sequence
  Artificial aptamer to IgGh
cgcttaacaagcgatgcatcgatgaatgcgtg

SEQ ID NO: 2092 - DNA, 32 bp, Artificial sequence
  Artificial aptamer to IgGm
cgcttgctgagaaagcaagagctcggggacta

SEQ ID NO: 2093 - DNA, 32 bp, Artificial sequence
  Artificial aptamer to IgGh
cgcttgggaaatctgggggaggtgggcagagg

SEQ ID NO: 2094 - DNA, 32 bp, Artificial sequence
  Artificial aptamer to IgGh
cgctttgataaagcgtacgaacccattacgtt

SEQ ID NO: 2095 - DNA, 32 bp, Artificial sequence
  Artificial aptamer to IgGm
cggaaaaaaggctaggtggtggactgggcgcg

SEQ ID NO: 2096 - DNA, 32 bp, Artificial sequence
  Artificial aptamer to IgGh
cggaaggcggaggaacggtacattatcagtcc

SEQ ID NO: 2097 - DNA, 32 bp, Artificial sequence
  Artificial aptamer to IgGh
cggaatgacggcgggccggagggggtaaagta

SEQ ID NO: 2098 - DNA, 32 bp, Artificial sequence
  Artificial aptamer to IgGh
cggaatggtggtgggaattaattcgaaatcct

SEQ ID NO: 2099 - DNA, 32 bp, Artificial sequence
  Artificial aptamer to IgGh
cggaatgtaaggatggatggaggaataattga

SEQ ID NO: 2100 - DNA, 32 bp, Artificial sequence
  Artificial aptamer to IgGm
cggaattcagatgcggaggttcgggggcaaca

SEQ ID NO: 2101 - DNA, 32 bp, Artificial sequence
  Artificial aptamer to IgGm
cggaatttcgacattgggaaattacgaggatc

SEQ ID NO: 2102 - DNA, 32 bp, Artificial sequence
  Artificial aptamer to IgGm
cggaccgcatcggtgaccgctgatgcaactgg

SEQ ID NO: 2103 - DNA, 32 bp, Artificial sequence
  Artificial aptamer to IgGh
cggacgagggccacgaaggagggggaaggaac

SEQ ID NO: 2104 - DNA, 32 bp, Artificial sequence
  Artificial aptamer to IgGh
cggacggcggaaagggtcaaattgcaaaggca

SEQ ID NO: 2105 - DNA, 32 bp, Artificial sequence
  Artificial aptamer to IgGh
cggacggggggagggcgggaacacaacaagat

SEQ ID NO: 2106 - DNA, 32 bp, Artificial sequence
  Artificial aptamer to IgGm
cggacgtccggcacgtgcgaagaaccgctaat

SEQ ID NO: 2107 - DNA, 32 bp, Artificial sequence
  Artificial aptamer to IgGh
cggactgggtggtgaggtggaaagggctaaac

SEQ ID NO: 2108 - DNA, 32 bp, Artificial sequence
  Artificial aptamer to IgGh
cggaggaggacggcatcagaccgggggtatgt

SEQ ID NO: 2109 - DNA, 32 bp, Artificial sequence
  Artificial aptamer to IgGh
cggaggaggaggtacttgtggaaaacttgttc

SEQ ID NO: 2110 - DNA, 32 bp, Artificial sequence
  Artificial aptamer to IgGh
cggaggagggagggccttaaataaatgcgcct

SEQ ID NO: 2111 - DNA, 32 bp, Artificial sequence
  Artificial aptamer to IgGh
cggaggaggtggggggttctaaaacgagtagt

SEQ ID NO: 2112 - DNA, 32 bp, Artificial sequence
  Artificial aptamer to IgGh
cggaggaggttggacaaatcggtcggatcgtc

SEQ ID NO: 2113 - DNA, 32 bp, Artificial sequence
  Artificial aptamer to IgGh
cggaggctggatggaagaagctatgggcgaac

SEQ ID NO: 2114 - DNA, 32 bp, Artificial sequence
  Artificial aptamer to IgGh
cggagggagggtggatacagataatacttata

SEQ ID NO: 2115 - DNA, 32 bp, Artificial sequence
  Artificial aptamer to IgGm
cggagggggagagggattactgcaaacttatt

SEQ ID NO: 2116 - DNA, 32 bp, Artificial sequence
  Artificial aptamer to IgGh
cggagggggcacggtagaatgcgcgtactcta

SEQ ID NO: 2117 - DNA, 32 bp, Artificial sequence
  Artificial aptamer to IgGm
cggagggtgaggaggctattatgcgagggtcg

SEQ ID NO: 2118 - DNA, 32 bp, Artificial sequence
  Artificial aptamer to IgGm
cggaggtggagggtcacttcaaaaagtcaaac

SEQ ID NO: 2119 - DNA, 32 bp, Artificial sequence
  Artificial aptamer to IgGh
cggatacgagtgggggagggacggaggttagg

SEQ ID NO: 2120 - DNA, 32 bp, Artificial sequence
  Artificial aptamer to IgGh
cggatgaaattaccgaaagcggtacagccggt

SEQ ID NO: 2121 - DNA, 32 bp, Artificial sequence
  Artificial aptamer to IgGm
cggatgcgaggcattaaaagttcgcttccgta

SEQ ID NO: 2122 - DNA, 32 bp, Artificial sequence
  Artificial aptamer to IgGm
cggcaagggtggtggctgcaaagccaggcatc

SEQ ID NO: 2123 - DNA, 32 bp, Artificial sequence
  Artificial aptamer to IgGh
cggcactgttaatgggagggatgggggatatc

SEQ ID NO: 2124 - DNA, 32 bp, Artificial sequence
  Artificial aptamer to IgGm
cggcagggggaggctttatctacgagtggcga

SEQ ID NO: 2125 - DNA, 32 bp, Artificial sequence
  Artificial aptamer to IgGh
cggcatggggggggcgagtcaattctccaagg

SEQ ID NO: 2126 - DNA, 32 bp, Artificial sequence
  Artificial aptamer to IgGh
cggccggcggtggtaagtctgattggtactcg

SEQ ID NO: 2127 - DNA, 32 bp, Artificial sequence
  Artificial aptamer to IgGm
cggcggaaactttcgcaaccccacgaaggtgg

SEQ ID NO: 2128 - DNA, 32 bp, Artificial sequence
  Artificial aptamer to IgGm
cggcggaaggcggcagtgtcgatttcaaagcc

SEQ ID NO: 2129 - DNA, 32 bp, Artificial sequence
  Artificial aptamer to IgGm
cggcggaggctacggaaactttcgtttgaggt

SEQ ID NO: 2130 - DNA, 32 bp, Artificial sequence
  Artificial aptamer to IgGm
cggcggaggggtaggtacgatggtggtactcg

SEQ ID NO: 2131 - DNA, 32 bp, Artificial sequence
  Artificial aptamer to IgGm
cggcggatggaccggcgatgctcaccttgaca

SEQ ID NO: 2132 - DNA, 32 bp, Artificial sequence
  Artificial aptamer to IgGm
cggcggatggccgaatgagaatcgtacttctc

SEQ ID NO: 2133 - DNA, 32 bp, Artificial sequence
  Artificial aptamer to IgGh
cggcggcgggttggtccaatggctgaacataa

SEQ ID NO: 2134 - DNA, 32 bp, Artificial sequence
  Artificial aptamer to IgGh
cggcggctgggaggagatttgtgtgtgttgac

SEQ ID NO: 2135 - DNA, 32 bp, Artificial sequence
  Artificial aptamer to IgGh
cggcgggggactggttttattaagggggagag

SEQ ID NO: 2136 - DNA, 32 bp, Artificial sequence
  Artificial aptamer to IgGm
cggcgggtggagggattctaggaacgtgtggg

SEQ ID NO: 2137 - DNA, 32 bp, Artificial sequence
  Artificial aptamer to IgGh
cggcgggtgggggcaatggacggacacaatgc

SEQ ID NO: 2138 - DNA, 32 bp, Artificial sequence
  Artificial aptamer to IgGm
cggctcccccgacccgacgaaaacgcgcggaa

SEQ ID NO: 2139 - DNA, 32 bp, Artificial sequence
  Artificial aptamer to IgGh
cggctgggagctaggcgcgtcctggggacgta

SEQ ID NO: 2140 - DNA, 32 bp, Artificial sequence
  Artificial aptamer to IgGm
cgggacgggggtaggaagctgtaattctaagc

SEQ ID NO: 2141 - DNA, 32 bp, Artificial sequence
  Artificial aptamer to IgGh
cgggagacaataactggcggcggcgtggacaa

SEQ ID NO: 2142 - DNA, 32 bp, Artificial sequence
  Artificial aptamer to IgGh
cgggagctccgttgctctatgtgacgagcaat

SEQ ID NO: 2143 - DNA, 32 bp, Artificial sequence
  Artificial aptamer to IgGh
cgggagggggaggcgcgatcttcttggcagcg

SEQ ID NO: 2144 - DNA, 32 bp, Artificial sequence
  Artificial aptamer to IgGh
cgggagggttatcgggcggtcatgcacgggag

SEQ ID NO: 2145 - DNA, 32 bp, Artificial sequence
  Artificial aptamer to IgGh
cgggataattcacggaaggtggtggccatgca

SEQ ID NO: 2146 - DNA, 32 bp, Artificial sequence
  Artificial aptamer to IgGm
cgggcacatcgaaacaagcgcatgcatgccct

SEQ ID NO: 2147 - DNA, 32 bp, Artificial sequence
  Artificial aptamer to IgGm
cgggcggaggaggagtgaacaggaaccaacgg

SEQ ID NO: 2148 - DNA, 32 bp, Artificial sequence
  Artificial aptamer to IgGh
cgggcggtggaacggaataattacggtagtct

SEQ ID NO: 2149 - DNA, 32 bp, Artificial sequence
  Artificial aptamer to IgGh
cgggctagggcgaagggaagatgggacgatgg

SEQ ID NO: 2150 - DNA, 32 bp, Artificial sequence
  Artificial aptamer to IgGh
cgggctaggggaatacgggaaactgggggcat

SEQ ID NO: 2151 - DNA, 32 bp, Artificial sequence
  Artificial aptamer to IgGh
cgggctctggctcttcggcggacggttggtgg

SEQ ID NO: 2152 - DNA, 32 bp, Artificial sequence
  Artificial aptamer to IgGm
cggggaaggcggggggcggatcatatcaactg

SEQ ID NO: 2153 - DNA, 32 bp, Artificial sequence
  Artificial aptamer to IgGm
cggggaggagggggagaagtagggcaacatcc

SEQ ID NO: 2154 - DNA, 32 bp, Artificial sequence
  Artificial aptamer to IgGm
cggggagtcatatcgttggggatgggggaggt

SEQ ID NO: 2155 - DNA, 32 bp, Artificial sequence
  Artificial aptamer to IgGh
cgggggacgggtggtggtactttccggggaat

SEQ ID NO: 2156 - DNA, 32 bp, Artificial sequence
  Artificial aptamer to IgGh
cgggggaggaggtatggttgatgattttcatt

SEQ ID NO: 2157 - DNA, 32 bp, Artificial sequence
  Artificial aptamer to IgGm
cgggggcgggcatggcaaggtacttgtatagc

SEQ ID NO: 2158 - DNA, 32 bp, Artificial sequence
  Artificial aptamer to IgGh
cgggggctcggtggaagagtcttagcttaaaa

SEQ ID NO: 2159 - DNA, 32 bp, Artificial sequence
  Artificial aptamer to IgGh
cggggggacggtggtgttagataccccttgaa

SEQ ID NO: 2160 - DNA, 32 bp, Artificial sequence
  Artificial aptamer to IgGh
cggggggaggtgggtatgggtatccaagactt

SEQ ID NO: 2161 - DNA, 32 bp, Artificial sequence
  Artificial aptamer to IgGh
cgggggggaggaatcatggtcgggacgatggg

SEQ ID NO: 2162 - DNA, 32 bp, Artificial sequence
  Artificial aptamer to IgGm
cggggggggtggtctggggaataccgattttg

SEQ ID NO: 2163 - DNA, 32 bp, Artificial sequence
  Artificial aptamer to IgGh
cgggggggttaccagtcaggggagggaatggg

SEQ ID NO: 2164 - DNA, 32 bp, Artificial sequence
  Artificial aptamer to IgGh
cgggggtggagggatagcactggacctcgagg

SEQ ID NO: 2165 - DNA, 32 bp, Artificial sequence
  Artificial aptamer to IgGm
cgggggtgggtaacaccgggaggtaggagggg

SEQ ID NO: 2166 - DNA, 32 bp, Artificial sequence
  Artificial aptamer to IgGh
cgggggtggttcggccggggttgggaacggac

SEQ ID NO: 2167 - DNA, 32 bp, Artificial sequence
  Artificial aptamer to IgGh
cggggtgcactcggtgggtggggttctggggc

SEQ ID NO: 2168 - DNA, 32 bp, Artificial sequence
  Artificial aptamer to IgGm
cggggtgggggtacggttgaacttagtttttg

SEQ ID NO: 2169 - DNA, 32 bp, Artificial sequence
  Artificial aptamer to IgGh
cggggtggtgggtggaaacggtaaatgaaagc

SEQ ID NO: 2170 - DNA, 32 bp, Artificial sequence
  Artificial aptamer to IgGh
cgggtatctaactcacgggggaaggtggaagg

SEQ ID NO: 2171 - DNA, 32 bp, Artificial sequence
  Artificial aptamer to IgGh
cgggtccagcgagtgtcgcgggggcggaagga

SEQ ID NO: 2172 - DNA, 32 bp, Artificial sequence
  Artificial aptamer to IgGh
cgggtggaaggccaggtggcggaagtataaat

SEQ ID NO: 2173 - DNA, 32 bp, Artificial sequence
  Artificial aptamer to IgGh
cgggtggagggacggaggtagattttcctggt

SEQ ID NO: 2174 - DNA, 32 bp, Artificial sequence
  Artificial aptamer to IgGh
cgggtgggctgggcggaacattttaagggaga

SEQ ID NO: 2175 - DNA, 32 bp, Artificial sequence
  Artificial aptamer to IgGh
cgggtggggggagggtacgactcatatgtctt

SEQ ID NO: 2176 - DNA, 32 bp, Artificial sequence
  Artificial aptamer to IgGh
cgggttgttttgtcgtggtcggccggtggagg

SEQ ID NO: 2177 - DNA, 32 bp, Artificial sequence
  Artificial aptamer to IgGm
cgggtttccatagtcagtaggctgagtatgta

SEQ ID NO: 2178 - DNA, 32 bp, Artificial sequence
  Artificial aptamer to IgGm
cggtaaggttggtcgggggagaaagatgagag

SEQ ID NO: 2179 - DNA, 32 bp, Artificial sequence
  Artificial aptamer to IgGm
cggtacaaccgatgtagtggtggacacttctc

SEQ ID NO: 2180 - DNA, 32 bp, Artificial sequence
  Artificial aptamer to IgGh
cggtacgaaacgttagcatggattggctaacg

SEQ ID NO: 2181 - DNA, 32 bp, Artificial sequence
  Artificial aptamer to IgGm
cggtaggcggcttgggcttggctcgtggcatc

SEQ ID NO: 2182 - DNA, 32 bp, Artificial sequence
  Artificial aptamer to IgGh
cggtcgcggggtacgggggtggtcatgcactg

SEQ ID NO: 2183 - DNA, 32 bp, Artificial sequence
  Artificial aptamer to IgGh
cggtcgcgttactcaaggtgcgaacgcgcaca

SEQ ID NO: 2184 - DNA, 32 bp, Artificial sequence
  Artificial aptamer to IgGm
cggtggaggataggcgggatcattgacttttg

SEQ ID NO: 2185 - DNA, 32 bp, Artificial sequence
  Artificial aptamer to IgGm
cggtggcagcggtacgttctttcgtgccgaag

SEQ ID NO: 2186 - DNA, 32 bp, Artificial sequence
  Artificial aptamer to IgGh
cggtggcggcaggtagctaaaataatatgcgt

SEQ ID NO: 2187 - DNA, 32 bp, Artificial sequence
  Artificial aptamer to IgGh
cggtggctcggtggtatacggtggaagactac

SEQ ID NO: 2188 - DNA, 32 bp, Artificial sequence
  Artificial aptamer to IgGm
cggtgggaggacggggttggtatcgtatatag

SEQ ID NO: 2189 - DNA, 32 bp, Artificial sequence
  Artificial aptamer to IgGh
cggtgggggggtggaaaactgtagagcaagtg

SEQ ID NO: 2190 - DNA, 32 bp, Artificial sequence
  Artificial aptamer to IgGh
cggtgggtggcgggcgtgttggtgcattgacg

SEQ ID NO: 2191 - DNA, 32 bp, Artificial sequence
  Artificial aptamer to IgGm
cggtggtggggggtgcgtataccatcacagtg

SEQ ID NO: 2192 - DNA, 32 bp, Artificial sequence
  Artificial aptamer to IgGh
cggtgtcaagagggtgggggagggcagactat

SEQ ID NO: 2193 - DNA, 32 bp, Artificial sequence
  Artificial aptamer to IgGh
cggttcccagaatactgggttgcaaccattat

SEQ ID NO: 2194 - DNA, 32 bp, Artificial sequence
  Artificial aptamer to IgGm
cggttgtaccgttgatcgtggggcacgaggcg

SEQ ID NO: 2195 - DNA, 32 bp, Artificial sequence
  Artificial aptamer to IgGm
cggtttattcgattaagaattcatcaaaaccg

SEQ ID NO: 2196 - DNA, 32 bp, Artificial sequence
  Artificial aptamer to IgGh
cggttttgggatgggaaccgggggaggtaggg

SEQ ID NO: 2197 - DNA, 32 bp, Artificial sequence
  Artificial aptamer to IgGm
cgtacgactggcggcaggaggatccagaacga

SEQ ID NO: 2198 - DNA, 32 bp, Artificial sequence
  Artificial aptamer to IgGm
cgtacgtttttttcgtctggagggggatgggc

SEQ ID NO: 2199 - DNA, 32 bp, Artificial sequence
  Artificial aptamer to IgGm
cgtagaccaagatttgggtggcggactggttg

SEQ ID NO: 2200 - DNA, 32 bp, Artificial sequence
  Artificial aptamer to IgGm
cgtagcggacgtgctacttgggtcggaaccct

SEQ ID NO: 2201 - DNA, 32 bp, Artificial sequence
  Artificial aptamer to IgGh
cgtagtacataaagggggtggagggcgcggcg

SEQ ID NO: 2202 - DNA, 32 bp, Artificial sequence
  Artificial aptamer to IgGm
cgtatggcatccggagcagaagctgactccgg

SEQ ID NO: 2203 - DNA, 32 bp, Artificial sequence
  Artificial aptamer to IgGm
cgtcagggttggcaggtggttatgttccttga

SEQ ID NO: 2204 - DNA, 32 bp, Artificial sequence
  Artificial aptamer to IgGm
cgtcattacggaggcatttcagaatgcatgtc

SEQ ID NO: 2205 - DNA, 32 bp, Artificial sequence
  Artificial aptamer to IgGm
cgtccggaaagagggggaaggtggttatacca

SEQ ID NO: 2206 - DNA, 32 bp, Artificial sequence
  Artificial aptamer to IgGh
cgtgaaaaatggtgggggacggtgtaagtgtt

SEQ ID NO: 2207 - DNA, 32 bp, Artificial sequence
  Artificial aptamer to IgGm
cgtgccatccatccatggctcgggctctcgtc

SEQ ID NO: 2208 - DNA, 32 bp, Artificial sequence
  Artificial aptamer to IgGm
cgtgcggaaaacgcaaggagctcatcccaagc

SEQ ID NO: 2209 - DNA, 32 bp, Artificial sequence
  Artificial aptamer to IgGh
cgtggactgacgagccgctcccggctgacgat

SEQ ID NO: 2210 - DNA, 32 bp, Artificial sequence
  Artificial aptamer to IgGm
cgtggatggaggccgggataaggatacccagc

SEQ ID NO: 2211 - DNA, 32 bp, Artificial sequence
  Artificial aptamer to IgGm
cgtggcactgtccgcagcgagggctgccgggc

SEQ ID NO: 2212 - DNA, 32 bp, Artificial sequence
  Artificial aptamer to IgGh
cgtggggaaaaaactgtggaggtaggccgggg

SEQ ID NO: 2213 - DNA, 32 bp, Artificial sequence
  Artificial aptamer to IgGm
cgtgtaaaaacgggaccgaagtactgcggtca

SEQ ID NO: 2214 - DNA, 32 bp, Artificial sequence
  Artificial aptamer to IgGh
cgtgtaatatggaggcggagaggatgtagtat

SEQ ID NO: 2215 - DNA, 32 bp, Artificial sequence
  Artificial aptamer to IgGh
cgtgtaattgacggacgggggcggcaggagag

SEQ ID NO: 2216 - DNA, 32 bp, Artificial sequence
  Artificial aptamer to IgGm
cgtgtacatagagccacggcttacccgaagcg

SEQ ID NO: 2217 - DNA, 32 bp, Artificial sequence
  Artificial aptamer to IgGm
cgtgtattccacgggcccgcgccactgctgac

SEQ ID NO: 2218 - DNA, 32 bp, Artificial sequence
  Artificial aptamer to IgGm
cgtgttcggcggcgggggagcggacatttcac

SEQ ID NO: 2219 - DNA, 32 bp, Artificial sequence
  Artificial aptamer to IgGh
cgttaagcgtaaccacccacctcatgggtgac

SEQ ID NO: 2220 - DNA, 32 bp, Artificial sequence
  Artificial aptamer to IgGm
cgttactggcgacgtcagatccagtccggatc

SEQ ID NO: 2221 - DNA, 32 bp, Artificial sequence
  Artificial aptamer to IgGh
cgttccggctaggcaggcggtggggaaacata

SEQ ID NO: 2222 - DNA, 32 bp, Artificial sequence
  Artificial aptamer to IgGm
cgttccgggggctgtccgggtaacggggtcta

SEQ ID NO: 2223 - DNA, 32 bp, Artificial sequence
  Artificial aptamer to IgGm
cgttgagggcgaatcccaatcgggccccgcca

SEQ ID NO: 2224 - DNA, 32 bp, Artificial sequence
  Artificial aptamer to IgGh
cgttgaggggagggtagtagtgggcgcgggat

SEQ ID NO: 2225 - DNA, 32 bp, Artificial sequence
  Artificial aptamer to IgGh
cgttgagtacggatacttatcatccgctcaat

SEQ ID NO: 2226 - DNA, 32 bp, Artificial sequence
  Artificial aptamer to IgGm
cgtttggtcgatcccgaaaaaacgaagcccga

SEQ ID NO: 2227 - DNA, 32 bp, Artificial sequence
  Artificial aptamer to IgGm
cgttttacggcaatgtgtatacattgaagata

SEQ ID NO: 2228 - DNA, 32 bp, Artificial sequence
  Artificial aptamer to IgGh
ctaaacaattactatagacggacggtggatgg

SEQ ID NO: 2229 - DNA, 32 bp, Artificial sequence
  Artificial aptamer to IgGh
ctaagatccgctgaaccggatatcccttaggc

SEQ ID NO: 2230 - DNA, 32 bp, Artificial sequence
  Artificial aptamer to IgGh
ctaagggctgtgatgtggtgaggtggtggtcg

SEQ ID NO: 2231 - DNA, 32 bp, Artificial sequence
  Artificial aptamer to IgGh
ctacaataagtacttatgggaggtgggcggag

SEQ ID NO: 2232 - DNA, 32 bp, Artificial sequence
  Artificial aptamer to IgGm
ctaccgttgggcagatccccagtacagacggg

SEQ ID NO: 2233 - DNA, 32 bp, Artificial sequence
  Artificial aptamer to IgGm
ctagacgggcctcaagagtggggccggtaaac

SEQ ID NO: 2234 - DNA, 32 bp, Artificial sequence
  Artificial aptamer to IgGm
ctagagtggacttatagggcggtgggcggtgc

SEQ ID NO: 2235 - DNA, 32 bp, Artificial sequence
  Artificial aptamer to IgGm
ctagcaaacatattcgggcggagaggcccgtg

SEQ ID NO: 2236 - DNA, 32 bp, Artificial sequence
  Artificial aptamer to IgGh
ctaggcatcaaaaatcggacggacggtggagt

SEQ ID NO: 2237 - DNA, 32 bp, Artificial sequence
  Artificial aptamer to IgGm
ctagtatgttaagaaatgggggtggtaggggg

SEQ ID NO: 2238 - DNA, 32 bp, Artificial sequence
  Artificial aptamer to IgGh
ctagttgaacatagtgcgcagttgcgcacggt

SEQ ID NO: 2239 - DNA, 32 bp, Artificial sequence
  Artificial aptamer to IgGm
ctatattactcgtgcactcggaggtcggaggg

SEQ ID NO: 2240 - DNA, 32 bp, Artificial sequence
  Artificial aptamer to IgGm
ctatgaaacgcgtccagtgccgctccacgcgt

SEQ ID NO: 2241 - DNA, 32 bp, Artificial sequence
  Artificial aptamer to IgGm
ctatgacaaccggtcctattggcataggccaa

SEQ ID NO: 2242 - DNA, 32 bp, Artificial sequence
  Artificial aptamer to IgGh
ctcaatcaagtggaggaggcggggtactgctt

SEQ ID NO: 2243 - DNA, 32 bp, Artificial sequence
  Artificial aptamer to IgGm
ctcaattcactggtgggggatcgggcagttct

SEQ ID NO: 2244 - DNA, 32 bp, Artificial sequence
  Artificial aptamer to IgGh
ctcacctgagtgcacatgtgttactatgtgca

SEQ ID NO: 2245 - DNA, 32 bp, Artificial sequence
  Artificial aptamer to IgGh
ctcacggtagtttaacaattggtggatggcgg

SEQ ID NO: 2246 - DNA, 32 bp, Artificial sequence
  Artificial aptamer to IgGm
ctcagggaacaggggcgttccgtgtccagtta

SEQ ID NO: 2247 - DNA, 32 bp, Artificial sequence
  Artificial aptamer to IgGh
ctcatacatgcggtgaggaggggggtggactt

SEQ ID NO: 2248 - DNA, 32 bp, Artificial sequence
  Artificial aptamer to IgGh
ctccacgaggggtggtacgggcgaaaccgtag

SEQ ID NO: 2249 - DNA, 32 bp, Artificial sequence
  Artificial aptamer to IgGm
ctccagtgctatgtcgggggtggggggaatgg

SEQ ID NO: 2250 - DNA, 32 bp, Artificial sequence
  Artificial aptamer to IgGm
ctcccggttgttttcgggcgctttccgatgcg

SEQ ID NO: 2251 - DNA, 32 bp, Artificial sequence
  Artificial aptamer to IgGm
ctccctcctatttagtagcatgggagggcaac

SEQ ID NO: 2252 - DNA, 32 bp, Artificial sequence
  Artificial aptamer to IgGm
ctccgagtgacacttgctcgccccattagggg

SEQ ID NO: 2253 - DNA, 32 bp, Artificial sequence
  Artificial aptamer to IgGh
ctccggcggtgggggtatataatattggtcgc

SEQ ID NO: 2254 - DNA, 32 bp, Artificial sequence
  Artificial aptamer to IgGm
ctccggtaagaagtggccttcttcctacggtt

SEQ ID NO: 2255 - DNA, 32 bp, Artificial sequence
  Artificial aptamer to IgGm
ctcctctcccgcccatcggtaactcacgggag

SEQ ID NO: 2256 - DNA, 32 bp, Artificial sequence
  Artificial aptamer to IgGh
ctcgagtggggatggtggcggagtgttagaag

SEQ ID NO: 2257 - DNA, 32 bp, Artificial sequence
  Artificial aptamer to IgGm
ctcgcaagatcgtagcggacggtgggtaaccg

SEQ ID NO: 2258 - DNA, 32 bp, Artificial sequence
  Artificial aptamer to IgGh
ctcggaggagcggaggaggtagatcctgagac

SEQ ID NO: 2259 - DNA, 32 bp, Artificial sequence
  Artificial aptamer to IgGh
ctcggctggtcaaagaatgggggacggtggga

SEQ ID NO: 2260 - DNA, 32 bp, Artificial sequence
  Artificial aptamer to IgGm
ctcggtggaagggggtttaatgtatatcgtag

SEQ ID NO: 2261 - DNA, 32 bp, Artificial sequence
  Artificial aptamer to IgGm
ctcggtttccgaaatgcgttcattgcatcgga

SEQ ID NO: 2262 - DNA, 32 bp, Artificial sequence
  Artificial aptamer to IgGh
ctcgttgaaaagacaacgcgtgcctcacgtta

SEQ ID NO: 2263 - DNA, 32 bp, Artificial sequence
  Artificial aptamer to IgGm
ctctaggcgaggatgtcactcgacatccgacg

SEQ ID NO: 2264 - DNA, 32 bp, Artificial sequence
  Artificial aptamer to IgGm
ctctataggatcatctgtttgatccttagtac

SEQ ID NO: 2265 - DNA, 32 bp, Artificial sequence
  Artificial aptamer to IgGh
ctgaagaaggaggtggaggagaaatgacgtaa

SEQ ID NO: 2266 - DNA, 32 bp, Artificial sequence
  Artificial aptamer to IgGh
ctgaccaactaggcagtccggctagtccggaa

SEQ ID NO: 2267 - DNA, 32 bp, Artificial sequence
  Artificial aptamer to IgGm
ctgactcacgacgggtgggatccgcccgaaag

SEQ ID NO: 2268 - DNA, 32 bp, Artificial sequence
  Artificial aptamer to IgGm
ctgaggcgttgtttgcagtgactctaacgcca

SEQ ID NO: 2269 - DNA, 32 bp, Artificial sequence
  Artificial aptamer to IgGh
ctgataggaaacgcgggcaccagcccagcgtc

SEQ ID NO: 2270 - DNA, 32 bp, Artificial sequence
  Artificial aptamer to IgGm
ctgcagctgtaataacctcggcggttggccgg

SEQ ID NO: 2271 - DNA, 32 bp, Artificial sequence
  Artificial aptamer to IgGm
ctgcccacatttacacaaccggatcgcggttg

SEQ ID NO: 2272 - DNA, 32 bp, Artificial sequence
  Artificial aptamer to IgGh
ctgcgaacttcagtatggacgggggtggttgg

SEQ ID NO: 2273 - DNA, 32 bp, Artificial sequence
  Artificial aptamer to IgGh
ctgcgaagcgtgcaggtacgccggggaaggca

SEQ ID NO: 2274 - DNA, 32 bp, Artificial sequence
  Artificial aptamer to IgGh
ctgcttataatattacagaggaggagggtggt

SEQ ID NO: 2275 - DNA, 32 bp, Artificial sequence
  Artificial aptamer to IgGh
ctggaattacctccgcgaatcaatcgcgctga

SEQ ID NO: 2276 - DNA, 32 bp, Artificial sequence
  Artificial aptamer to IgGh
ctggaggtggttggcggtcagatgagagccta

SEQ ID NO: 2277 - DNA, 32 bp, Artificial sequence
  Artificial aptamer to IgGm
ctggatcctcccgctgaatttacctcagcgca

SEQ ID NO: 2278 - DNA, 32 bp, Artificial sequence
  Artificial aptamer to IgGh
ctgggatggaggtggggttgaatgaaaagtga

SEQ ID NO: 2279 - DNA, 32 bp, Artificial sequence
  Artificial aptamer to IgGm
ctgggcagcgagtttccttcgcagtgcacggt

SEQ ID NO: 2280 - DNA, 32 bp, Artificial sequence
  Artificial aptamer to IgGh
ctggggcaacaacgagtaggcgaggtgggggc

SEQ ID NO: 2281 - DNA, 32 bp, Artificial sequence
  Artificial aptamer to IgGh
ctggggtacgaaaacaaacgggggtggtggtg

SEQ ID NO: 2282 - DNA, 32 bp, Artificial sequence
  Artificial aptamer to IgGh
ctggggtatggccagggtgtatggcaccgcgt

SEQ ID NO: 2283 - DNA, 32 bp, Artificial sequence
  Artificial aptamer to IgGm
ctggtcaagcggtggaaatcacaccagcgccc

SEQ ID NO: 2284 - DNA, 32 bp, Artificial sequence
  Artificial aptamer to IgGh
ctggtggacagggaacagttttttacagttcc

SEQ ID NO: 2285 - DNA, 32 bp, Artificial sequence
  Artificial aptamer to IgGm
ctggtggagggtggggggaggtcagaccacct

SEQ ID NO: 2286 - DNA, 32 bp, Artificial sequence
  Artificial aptamer to IgGh
ctggtggttggcggacaactgcgtttcctatg

SEQ ID NO: 2287 - DNA, 32 bp, Artificial sequence
  Artificial aptamer to IgGh
ctgtaatggggagggcgacccggggtagggta

SEQ ID NO: 2288 - DNA, 32 bp, Artificial sequence
  Artificial aptamer to IgGm
ctgtagagctactacaggcgcacccgttcaca

SEQ ID NO: 2289 - DNA, 32 bp, Artificial sequence
  Artificial aptamer to IgGh
ctgtaggataaaggaggttggatggcattagc

SEQ ID NO: 2290 - DNA, 32 bp, Artificial sequence
  Artificial aptamer to IgGm
ctgtagtatttgacgtaggtggcagggggtgg

SEQ ID NO: 2291 - DNA, 32 bp, Artificial sequence
  Artificial aptamer to IgGm
ctgtcattggagggttggcctgaccaaccaga

SEQ ID NO: 2292 - DNA, 32 bp, Artificial sequence
  Artificial aptamer to IgGm
ctgtggataaatatggggggacaggagggtaa

SEQ ID NO: 2293 - DNA, 32 bp, Artificial sequence
  Artificial aptamer to IgGh
ctgttgggtcgtcgccaaaattattggcgcga

SEQ ID NO: 2294 - DNA, 32 bp, Artificial sequence
  Artificial aptamer to IgGh
cttaaggagggggaacgggaatcacgtgagta

SEQ ID NO: 2295 - DNA, 32 bp, Artificial sequence
  Artificial aptamer to IgGm
cttagcggcaaacaggatgtgaggccgcacta

SEQ ID NO: 2296 - DNA, 32 bp, Artificial sequence
  Artificial aptamer to IgGh
cttagtttgagtggaccgcggaatacgcggaa

SEQ ID NO: 2297 - DNA, 32 bp, Artificial sequence
  Artificial aptamer to IgGm
cttcggtgttgtattttctcaacaccggtaac

SEQ ID NO: 2298 - DNA, 32 bp, Artificial sequence
  Artificial aptamer to IgGh
cttgatgtacctagattggtaaaggtacgtca

SEQ ID NO: 2299 - DNA, 32 bp, Artificial sequence
  Artificial aptamer to IgGm
cttggctgggggtgggcagcgatttcttcttg

SEQ ID NO: 2300 - DNA, 32 bp, Artificial sequence
  Artificial aptamer to IgGm
cttggggaacccaagatccttcaacaggaaca

SEQ ID NO: 2301 - DNA, 32 bp, Artificial sequence
  Artificial aptamer to IgGh
cttgggggcggcaggactaaccaagtacaggc

SEQ ID NO: 2302 - DNA, 32 bp, Artificial sequence
  Artificial aptamer to IgGh
cttggggttgtctaaagatgagggagggtggg

SEQ ID NO: 2303 - DNA, 32 bp, Artificial sequence
  Artificial aptamer to IgGh
cttgtggtgggggtggtcctacatgtggtctg

SEQ ID NO: 2304 - DNA, 32 bp, Artificial sequence
  Artificial aptamer to IgGm
cttgtgtcacacagttatgggatcggtggcgg

SEQ ID NO: 2305 - DNA, 32 bp, Artificial sequence
  Artificial aptamer to IgGh
ctttactggaaaggtggtggtaatgcaagacg

SEQ ID NO: 2306 - DNA, 32 bp, Artificial sequence
  Artificial aptamer to IgGm
ctttagggggcgggcggcgagtagagtaagag

SEQ ID NO: 2307 - DNA, 32 bp, Artificial sequence
  Artificial aptamer to IgGh
ctttcactaggaccggacggaggttggagacg

SEQ ID NO: 2308 - DNA, 32 bp, Artificial sequence
  Artificial aptamer to IgGm
ctttggtcgcacaagtgggttaccatgcgaat

SEQ ID NO: 2309 - DNA, 32 bp, Artificial sequence
  Artificial aptamer to IgGh
ctttggtgccccaccaaacgagctttgcacgc

SEQ ID NO: 2310 - DNA, 32 bp, Artificial sequence
  Artificial aptamer to IgGm
gaaaggtccattccctcaacgcaagggagacc

SEQ ID NO: 2311 - DNA, 32 bp, Artificial sequence
  Artificial aptamer to IgGm
gaacggggggcgggtaggtctttatgttaaag

SEQ ID NO: 2312 - DNA, 32 bp, Artificial sequence
  Artificial aptamer to IgGh
gaagggattgaacgctgatcggcggacggtgg

SEQ ID NO: 2313 - DNA, 32 bp, Artificial sequence
  Artificial aptamer to IgGm
gacaagggtggaagggggtatcaaaacgaggt

SEQ ID NO: 2314 - DNA, 32 bp, Artificial sequence
  Artificial aptamer to IgGh
gacaagtggatggcagggggcaagatggagtg

SEQ ID NO: 2315 - DNA, 32 bp, Artificial sequence
  Artificial aptamer to IgGm
gacaatattgggactaaaggaacggtgggggg

SEQ ID NO: 2316 - DNA, 32 bp, Artificial sequence
  Artificial aptamer to IgGh
gacacggacgaactgcgtccggccggggacac

SEQ ID NO: 2317 - DNA, 32 bp, Artificial sequence
  Artificial aptamer to IgGm
gacagttactgctgggaggagaggatggatgt

SEQ ID NO: 2318 - DNA, 32 bp, Artificial sequence
  Artificial aptamer to IgGh
gacatatacacaatgcggtggatgggggtagc

SEQ ID NO: 2319 - DNA, 32 bp, Artificial sequence
  Artificial aptamer to IgGm
gaccacgtgtaggatggtggtaggcgcgggta

SEQ ID NO: 2320 - DNA, 32 bp, Artificial sequence
  Artificial aptamer to IgGh
gacccagttcgccctcatcggacttgcgaaca

SEQ ID NO: 2321 - DNA, 32 bp, Artificial sequence
  Artificial aptamer to IgGh
gacccggaaatcgggtgggggttacgcttccc

SEQ ID NO: 2322 - DNA, 32 bp, Artificial sequence
  Artificial aptamer to IgGh
gaccgattagtgaagtaggctcgggggagggg

SEQ ID NO: 2323 - DNA, 32 bp, Artificial sequence
  Artificial aptamer to IgGh
gaccggcaggtacccgttcttgtaaacgggcg

SEQ ID NO: 2324 - DNA, 32 bp, Artificial sequence
  Artificial aptamer to IgGh
gacctgtatggcggcggagggaccttgtctga

SEQ ID NO: 2325 - DNA, 32 bp, Artificial sequence
  Artificial aptamer to IgGh
gaccttgccaaatcgaacgatcacgcgttcga

SEQ ID NO: 2326 - DNA, 32 bp, Artificial sequence
  Artificial aptamer to IgGh
gacgaggtggcaagtttgccggaaggcggggg

SEQ ID NO: 2327 - DNA, 32 bp, Artificial sequence
  Artificial aptamer to IgGm
gacgatctggaagtccctccaagggatcgata

SEQ ID NO: 2328 - DNA, 32 bp, Artificial sequence
  Artificial aptamer to IgGm
gacggattctaccgtgtaaagcacctggcttc

SEQ ID NO: 2329 - DNA, 32 bp, Artificial sequence
  Artificial aptamer to IgGh
gacgggaaggcgggatgggagagggataaaat

SEQ ID NO: 2330 - DNA, 32 bp, Artificial sequence
  Artificial aptamer to IgGh
gacgggggaggacggacttttaagattgggcc

SEQ ID NO: 2331 - DNA, 32 bp, Artificial sequence
  Artificial aptamer to IgGh
gacgggggtggagaggactgggaaaccggtgc

SEQ ID NO: 2332 - DNA, 32 bp, Artificial sequence
  Artificial aptamer to IgGh
gacgtaggaaagaaattttccttctaatacgt

SEQ ID NO: 2333 - DNA, 32 bp, Artificial sequence
  Artificial aptamer to IgGh
gacgtatgattatgaggtttgtatcatacgaa

SEQ ID NO: 2334 - DNA, 32 bp, Artificial sequence
  Artificial aptamer to IgGh
gacgttaatggggcggatcggaggaggttaag

SEQ ID NO: 2335 - DNA, 32 bp, Artificial sequence
  Artificial aptamer to IgGm
gacgttagggacgcatgggagggtagtggggt

SEQ ID NO: 2336 - DNA, 32 bp, Artificial sequence
  Artificial aptamer to IgGm
gactacaggtggtcgggggtgtagtactgaca

SEQ ID NO: 2337 - DNA, 32 bp, Artificial sequence
  Artificial aptamer to IgGm
gactgcaggggatcctgtcccaatgcattgca

SEQ ID NO: 2338 - DNA, 32 bp, Artificial sequence
  Artificial aptamer to IgGh
gagacccggtatggtggagggtgtacagtgga

SEQ ID NO: 2339 - DNA, 32 bp, Artificial sequence
  Artificial aptamer to IgGm
gagaggtaccggacaaaggtcgtagtccgggc

SEQ ID NO: 2340 - DNA, 32 bp, Artificial sequence
  Artificial aptamer to IgGm
gagcacgagaatggagggggtcggcggaaaca

SEQ ID NO: 2341 - DNA, 32 bp, Artificial sequence
  Artificial aptamer to IgGm
gagcgggcggtggaggcaaggtgcggccatgg

SEQ ID NO: 2342 - DNA, 32 bp, Artificial sequence
  Artificial aptamer to IgGh
gagcgtggagataatctggaggcagggcgggt

SEQ ID NO: 2343 - DNA, 32 bp, Artificial sequence
  Artificial aptamer to IgGm
gagcttgacgaggcggcggaggttatttaatg

SEQ ID NO: 2344 - DNA, 32 bp, Artificial sequence
  Artificial aptamer to IgGm
gaggactttccctgtgtcggagggtcggtggg

SEQ ID NO: 2345 - DNA, 32 bp, Artificial sequence
  Artificial aptamer to IgGm
gaggccattcctcggattagtgtcaagtacac

SEQ ID NO: 2346 - DNA, 32 bp, Artificial sequence
  Artificial aptamer to IgGm
gaggcgcacttccaccggtccggcacggtggt

SEQ ID NO: 2347 - DNA, 32 bp, Artificial sequence
  Artificial aptamer to IgGm
gaggggcataaataaggtaggtgggtgggatg

SEQ ID NO: 2348 - DNA, 32 bp, Artificial sequence
  Artificial aptamer to IgGh
gaggtgcgggggttgtcaagccttgtgcaccg

SEQ ID NO: 2349 - DNA, 32 bp, Artificial sequence
  Artificial aptamer to IgGm
gaggtgggactggggtatgcgggacttgtggg

SEQ ID NO: 2350 - DNA, 32 bp, Artificial sequence
  Artificial aptamer to IgGm
gaggtgggggaggcgaaaaggcctagctatgt

SEQ ID NO: 2351 - DNA, 32 bp, Artificial sequence
  Artificial aptamer to IgGh
gaggtgggggggtggcgaggacatcgctgggg

SEQ ID NO: 2352 - DNA, 32 bp, Artificial sequence
  Artificial aptamer to IgGh
gaggtggtagccggggggcttccgccccaggg

SEQ ID NO: 2353 - DNA, 32 bp, Artificial sequence
  Artificial aptamer to IgGh
gatagctactagtactcggcggtggtggatcg

SEQ ID NO: 2354 - DNA, 32 bp, Artificial sequence
  Artificial aptamer to IgGh
gatccgacaaggggggcagggaggggaaacga

SEQ ID NO: 2355 - DNA, 32 bp, Artificial sequence
  Artificial aptamer to IgGh
gatcggtggggcggtggtttcacggcacgggg

SEQ ID NO: 2356 - DNA, 32 bp, Artificial sequence
  Artificial aptamer to IgGh
gatcttggaggaggaggaaatccactttcatg

SEQ ID NO: 2357 - DNA, 32 bp, Artificial sequence
  Artificial aptamer to IgGh
gatggataataaacgatgggggtggagggtcg

SEQ ID NO: 2358 - DNA, 32 bp, Artificial sequence
  Artificial aptamer to IgGm
gattcagcggactgctgaagttatgaggtaac

SEQ ID NO: 2359 - DNA, 32 bp, Artificial sequence
  Artificial aptamer to IgGm
gattggtccgaaaccggaaacgtaacacgttg

SEQ ID NO: 2360 - DNA, 32 bp, Artificial sequence
  Artificial aptamer to IgGm
gattggtggtggcggggatcgcacttaatgtc

SEQ ID NO: 2361 - DNA, 32 bp, Artificial sequence
  Artificial aptamer to IgGh
gcaaaaggaataaacgggtggcggtacggtgc

SEQ ID NO: 2362 - DNA, 32 bp, Artificial sequence
  Artificial aptamer to IgGm
gcaacctccactcccggggcccggggcgggtg

SEQ ID NO: 2363 - DNA, 32 bp, Artificial sequence
  Artificial aptamer to IgGm
gcaagatagaacactttttgtggtgggggcgg

SEQ ID NO: 2364 - DNA, 32 bp, Artificial sequence
  Artificial aptamer to IgGm
gcaagcgcgggtcattccctagcgagaaacgc

SEQ ID NO: 2365 - DNA, 32 bp, Artificial sequence
  Artificial aptamer to IgGm
gcaaggaggaacgggggaactttacttaattt

SEQ ID NO: 2366 - DNA, 32 bp, Artificial sequence
  Artificial aptamer to IgGh
gcaaggtttgggggtggggaaatcacggaggt

SEQ ID NO: 2367 - DNA, 32 bp, Artificial sequence
  Artificial aptamer to IgGm
gcaatcacgagcttttaggggggtcgggggaa

SEQ ID NO: 2368 - DNA, 32 bp, Artificial sequence
  Artificial aptamer to IgGm
gcaatgacggagtacgggatgggtgggggcga

SEQ ID NO: 2369 - DNA, 32 bp, Artificial sequence
  Artificial aptamer to IgGm
gcaatgggagggcgggtgcgtgttgaatcggg

SEQ ID NO: 2370 - DNA, 32 bp, Artificial sequence
  Artificial aptamer to IgGh
gcacatgttcgtcatgtttggtaggtggagga

SEQ ID NO: 2371 - DNA, 32 bp, Artificial sequence
  Artificial aptamer to IgGm
gcacattcgtacacgcttccgggtgtgtgcgt

SEQ ID NO: 2372 - DNA, 32 bp, Artificial sequence
  Artificial aptamer to IgGh
gcacccgaaacagcgtaactcattacgctcga

SEQ ID NO: 2373 - DNA, 32 bp, Artificial sequence
  Artificial aptamer to IgGm
gcacgacgctttatacgttgtgggtttggacc

SEQ ID NO: 2374 - DNA, 32 bp, Artificial sequence
  Artificial aptamer to IgGh
gcacgagtcgggtgttggaggggggttggcga

SEQ ID NO: 2375 - DNA, 32 bp, Artificial sequence
  Artificial aptamer to IgGm
gcacggaatgctttcatactagaaagtccggc

SEQ ID NO: 2376 - DNA, 32 bp, Artificial sequence
  Artificial aptamer to IgGh
gcacggaccaccatggaggaggtagggggtat

SEQ ID NO: 2377 - DNA, 32 bp, Artificial sequence
  Artificial aptamer to IgGm
gcacgggaatgtaagcgggaaggaggttggaa

SEQ ID NO: 2378 - DNA, 32 bp, Artificial sequence
  Artificial aptamer to IgGm
gcacgttagcgcgggctaacctttgtgacaat

SEQ ID NO: 2379 - DNA, 32 bp, Artificial sequence
  Artificial aptamer to IgGm
gcacttggtgtcggtggttggagggagcctcg

SEQ ID NO: 2380 - DNA, 32 bp, Artificial sequence
  Artificial aptamer to IgGm
gcagaagaagtttttaaagggggttggaggcc

SEQ ID NO: 2381 - DNA, 32 bp, Artificial sequence
  Artificial aptamer to IgGm
gcagaatggatgggaggtcggaggcacctggt

SEQ ID NO: 2382 - DNA, 32 bp, Artificial sequence
  Artificial aptamer to IgGm
gcagcccttatcatgctagcgcgaagaccgcg

SEQ ID NO: 2383 - DNA, 32 bp, Artificial sequence
  Artificial aptamer to IgGm
gcagggagggcagtgtcacaacagggtgggac

SEQ ID NO: 2384 - DNA, 32 bp, Artificial sequence
  Artificial aptamer to IgGh
gcagggagggggtggagttagcggataggaca

SEQ ID NO: 2385 - DNA, 32 bp, Artificial sequence
  Artificial aptamer to IgGm
gcagggcggaggaatggaggtgtggagggtaa

SEQ ID NO: 2386 - DNA, 32 bp, Artificial sequence
  Artificial aptamer to IgGh
gcagggggcggggggttctacgtgtatccttc

SEQ ID NO: 2387 - DNA, 32 bp, Artificial sequence
  Artificial aptamer to IgGh
gcaggtggtcgggcggagtggatgtttatcgg

SEQ ID NO: 2388 - DNA, 32 bp, Artificial sequence
  Artificial aptamer to IgGh
gcagtagatatggaggaggggggtataccatt

SEQ ID NO: 2389 - DNA, 32 bp, Artificial sequence
  Artificial aptamer to IgGh
gcagtgatgcgtgaaaaagcggcggaggaggg

SEQ ID NO: 2390 - DNA, 32 bp, Artificial sequence
  Artificial aptamer to IgGh
gcagttaacaacttctggcgggcggtggatgg

SEQ ID NO: 2391 - DNA, 32 bp, Artificial sequence
  Artificial aptamer to IgGm
gcataaaacaaaatctagtggggggggatgga

SEQ ID NO: 2392 - DNA, 32 bp, Artificial sequence
  Artificial aptamer to IgGm
gcatgcactggtataagcggaggcggagggtg

SEQ ID NO: 2393 - DNA, 32 bp, Artificial sequence
  Artificial aptamer to IgGh
gcatgtagcatttccgaggtggatggcggtgt

SEQ ID NO: 2394 - DNA, 32 bp, Artificial sequence
  Artificial aptamer to IgGm
gccaagaggtacaggtggttgggggcatgatt

SEQ ID NO: 2395 - DNA, 32 bp, Artificial sequence
  Artificial aptamer to IgGh
gccacggcatagtggcaggaccactggcgcac

SEQ ID NO: 2396 - DNA, 32 bp, Artificial sequence
  Artificial aptamer to IgGh
gccagagggggtgggggggcctgcttcagtaa

SEQ ID NO: 2397 - DNA, 32 bp, Artificial sequence
  Artificial aptamer to IgGh
gccaggaaatagattgggcggcgggggttaaa

SEQ ID NO: 2398 - DNA, 32 bp, Artificial sequence
  Artificial aptamer to IgGm
gccagggactcgggggtcacggagctcccggc

SEQ ID NO: 2399 - DNA, 32 bp, Artificial sequence
  Artificial aptamer to IgGm
gccagggtgctggcgaaactatgacagcggtc

SEQ ID NO: 2400 - DNA, 32 bp, Artificial sequence
  Artificial aptamer to IgGm
gccatgatggaaaagcgcctaacgcgcacgcc

SEQ ID NO: 2401 - DNA, 32 bp, Artificial sequence
  Artificial aptamer to IgGm
gccatggcgcatgcaaaaaagcgcctccagta

SEQ ID NO: 2402 - DNA, 32 bp, Artificial sequence
  Artificial aptamer to IgGm
gcccaatggatgggagccagcgactgaccgct

SEQ ID NO: 2403 - DNA, 32 bp, Artificial sequence
  Artificial aptamer to IgGh
gcccagctccataacgactcggattgctggga

SEQ ID NO: 2404 - DNA, 32 bp, Artificial sequence
  Artificial aptamer to IgGh
gccccagggcatcgtcagaaggacgattaata

SEQ ID NO: 2405 - DNA, 32 bp, Artificial sequence
  Artificial aptamer to IgGh
gcccctttgatgatatcggtggcggtggactt

SEQ ID NO: 2406 - DNA, 32 bp, Artificial sequence
  Artificial aptamer to IgGm
gcccgacctctacgcgggggcatttgccagcc

SEQ ID NO: 2407 - DNA, 32 bp, Artificial sequence
  Artificial aptamer to IgGm
gcccgacttaagaacgcctggaagggggttgg

SEQ ID NO: 2408 - DNA, 32 bp, Artificial sequence
  Artificial aptamer to IgGh
gcccggcttgaacgagtaactacgttcaatga

SEQ ID NO: 2409 - DNA, 32 bp, Artificial sequence
  Artificial aptamer to IgGm
gcccgggcattgaagtgcgcgtgctaaggcta

SEQ ID NO: 2410 - DNA, 32 bp, Artificial sequence
  Artificial aptamer to IgGm
gcccggtatagcgtgacgacgcagttagtggg

SEQ ID NO: 2411 - DNA, 32 bp, Artificial sequence
  Artificial aptamer to IgGh
gccctcgggcacggactgacggaggtggggga

SEQ ID NO: 2412 - DNA, 32 bp, Artificial sequence
  Artificial aptamer to IgGm
gccctgtctggttacagctcacgttttacgtg

SEQ ID NO: 2413 - DNA, 32 bp, Artificial sequence
  Artificial aptamer to IgGh
gccgaagtttccggaaaccgtttccggtagat

SEQ ID NO: 2414 - DNA, 32 bp, Artificial sequence
  Artificial aptamer to IgGm
gccgacgggtacgttcaagggatgagggaggg

SEQ ID NO: 2415 - DNA, 32 bp, Artificial sequence
  Artificial aptamer to IgGm
gccgataagagggggcaaggggggaaattgca

SEQ ID NO: 2416 - DNA, 32 bp, Artificial sequence
  Artificial aptamer to IgGh
gccgctttgagatgggggcactgggggatcaa

SEQ ID NO: 2417 - DNA, 32 bp, Artificial sequence
  Artificial aptamer to IgGh
gccggcagcagcccgcgagaaataatctcgtt

SEQ ID NO: 2418 - DNA, 32 bp, Artificial sequence
  Artificial aptamer to IgGh
gccggccgcgatgtgagggtggtgggaagggc

SEQ ID NO: 2419 - DNA, 32 bp, Artificial sequence
  Artificial aptamer to IgGh
gccggccgcgttcggtccgggtgcttaccgat

SEQ ID NO: 2420 - DNA, 32 bp, Artificial sequence
  Artificial aptamer to IgGh
gccggcgggtggctggggaaaggcaagaggat

SEQ ID NO: 2421 - DNA, 32 bp, Artificial sequence
  Artificial aptamer to IgGh
gccggggacagggggaagggggggtggggaat

SEQ ID NO: 2422 - DNA, 32 bp, Artificial sequence
  Artificial aptamer to IgGh
gccggggcgggggaggtatgttgcgcaggaag

SEQ ID NO: 2423 - DNA, 32 bp, Artificial sequence
  Artificial aptamer to IgGh
gccgggtggtgatccttcgacacctacggctt

SEQ ID NO: 2424 - DNA, 32 bp, Artificial sequence
  Artificial aptamer to IgGm
gccggtggaaggtcggacatagggatatgttt

SEQ ID NO: 2425 - DNA, 32 bp, Artificial sequence
  Artificial aptamer to IgGh
gccggtggtggggaggttatacgaatatgctc

SEQ ID NO: 2426 - DNA, 32 bp, Artificial sequence
  Artificial aptamer to IgGm
gccgtcggagggggaggactatgagccacgtt

SEQ ID NO: 2427 - DNA, 32 bp, Artificial sequence
  Artificial aptamer to IgGh
gccgtctgtgtctcgtcggaggtggcggagtt

SEQ ID NO: 2428 - DNA, 32 bp, Artificial sequence
  Artificial aptamer to IgGm
gccgtggtatcacatcaagcgaggaagcttgc

SEQ ID NO: 2429 - DNA, 32 bp, Artificial sequence
  Artificial aptamer to IgGm
gccgttggtaaggtggaggtttcttcagcccc

SEQ ID NO: 2430 - DNA, 32 bp, Artificial sequence
  Artificial aptamer to IgGh
gcctcggggtattgggtattaagggctgggcc

SEQ ID NO: 2431 - DNA, 32 bp, Artificial sequence
  Artificial aptamer to IgGh
gcctctacttctcggctgggagggggaacttg

SEQ ID NO: 2432 - DNA, 32 bp, Artificial sequence
  Artificial aptamer to IgGh
gcctgggggacgggggacatcgtaagaagact

SEQ ID NO: 2433 - DNA, 32 bp, Artificial sequence
  Artificial aptamer to IgGm
gcctggggggactggtggccacatgaaaccat

SEQ ID NO: 2434 - DNA, 32 bp, Artificial sequence
  Artificial aptamer to IgGh
gccttagtaaagtcacgggagggtggaaggtc

SEQ ID NO: 2435 - DNA, 32 bp, Artificial sequence
  Artificial aptamer to IgGh
gcctttctagattgggataggaggagggcaac

SEQ ID NO: 2436 - DNA, 32 bp, Artificial sequence
  Artificial aptamer to IgGm
gcgaaaaacacattgggcacgtaccgatgtgt

SEQ ID NO: 2437 - DNA, 32 bp, Artificial sequence
  Artificial aptamer to IgGm
gcgaaagggggcggggggattttgtgggtacg

SEQ ID NO: 2438 - DNA, 32 bp, Artificial sequence
  Artificial aptamer to IgGm
gcgaactggaacggcggcggccaaccaacccc

SEQ ID NO: 2439 - DNA, 32 bp, Artificial sequence
  Artificial aptamer to IgGh
gcgaagggagggggtgtgggttccgcatcatc

SEQ ID NO: 2440 - DNA, 32 bp, Artificial sequence
  Artificial aptamer to IgGh
gcgaccatgtacacgaaacacaaagtggtcga

SEQ ID NO: 2441 - DNA, 32 bp, Artificial sequence
  Artificial aptamer to IgGm
gcgagctccaagggggtggtgcggcaggttac

SEQ ID NO: 2442 - DNA, 32 bp, Artificial sequence
  Artificial aptamer to IgGm
gcgaggcagtattggattcccgaaatcctgcc

SEQ ID NO: 2443 - DNA, 32 bp, Artificial sequence
  Artificial aptamer to IgGh
gcgatacaacacgggacggcggtagggcaata

SEQ ID NO: 2444 - DNA, 32 bp, Artificial sequence
  Artificial aptamer to IgGh
gcgatcaaacaggtggaggtaggaaatcgggg

SEQ ID NO: 2445 - DNA, 32 bp, Artificial sequence
  Artificial aptamer to IgGm
gcgatgggggtggatgggcgattttccttacg

SEQ ID NO: 2446 - DNA, 32 bp, Artificial sequence
  Artificial aptamer to IgGm
gcgattctcgggtttggtggaggaaggtaaaa

SEQ ID NO: 2447 - DNA, 32 bp, Artificial sequence
  Artificial aptamer to IgGm
gcgcaaaataagtataccggaggaggtgcggt

SEQ ID NO: 2448 - DNA, 32 bp, Artificial sequence
  Artificial aptamer to IgGm
gcgcaaagtgcatgcatgcgagcgcatcgcac

SEQ ID NO: 2449 - DNA, 32 bp, Artificial sequence
  Artificial aptamer to IgGh
gcgcaacaacgtgttgtgcgggaacagtcccc

SEQ ID NO: 2450 - DNA, 32 bp, Artificial sequence
  Artificial aptamer to IgGm
gcgcacctcgaaaggacaagctcctgcgcttc

SEQ ID NO: 2451 - DNA, 32 bp, Artificial sequence
  Artificial aptamer to IgGm
gcgccagtaactttcggttatgactgcgcgct

SEQ ID NO: 2452 - DNA, 32 bp, Artificial sequence
  Artificial aptamer to IgGm
gcgcctctgtgtttgttacagtaggaagggcg

SEQ ID NO: 2453 - DNA, 32 bp, Artificial sequence
  Artificial aptamer to IgGm
gcgcgcactattttagttttatctagcgcggt

SEQ ID NO: 2454 - DNA, 32 bp, Artificial sequence
  Artificial aptamer to IgGm
gcgcgcatcaaatgggcgcaaatttacgacta

SEQ ID NO: 2455 - DNA, 32 bp, Artificial sequence
  Artificial aptamer to IgGm
gcgcgcgatgactgcggcgcttttcaaaaaac

SEQ ID NO: 2456 - DNA, 32 bp, Artificial sequence
  Artificial aptamer to IgGm
gcgcgcggtcaggcgggggagatcagcaatgg

SEQ ID NO: 2457 - DNA, 32 bp, Artificial sequence
  Artificial aptamer to IgGh
gcggaaagggggttgggggactgtagaccgga

SEQ ID NO: 2458 - DNA, 32 bp, Artificial sequence
  Artificial aptamer to IgGh
gcggacggaggtgggcgctatttcattttaga

SEQ ID NO: 2459 - DNA, 32 bp, Artificial sequence
  Artificial aptamer to IgGh
gcggactcttgtagcttggtaggcggcaggcg

SEQ ID NO: 2460 - DNA, 32 bp, Artificial sequence
  Artificial aptamer to IgGm
gcggaggaggaggtctcctgcggggggaacgg

SEQ ID NO: 2461 - DNA, 32 bp, Artificial sequence
  Artificial aptamer to IgGm
gcggagggtcgggggtgaggagcgcaaactta

SEQ ID NO: 2462 - DNA, 32 bp, Artificial sequence
  Artificial aptamer to IgGh
gcggaggttaggaggggcggggaggtttagga

SEQ ID NO: 2463 - DNA, 32 bp, Artificial sequence
  Artificial aptamer to IgGm
gcggcacttgggaatacgggtaaccgggcggg

SEQ ID NO: 2464 - DNA, 32 bp, Artificial sequence
  Artificial aptamer to IgGm
gcggcggaggcggaacatctcgatatatcgta

SEQ ID NO: 2465 - DNA, 32 bp, Artificial sequence
  Artificial aptamer to IgGh
gcggcggaggtaggaaggttcttgactgtatc

SEQ ID NO: 2466 - DNA, 32 bp, Artificial sequence
  Artificial aptamer to IgGh
gcggcgggaaagggacaggtccggcggaggag

SEQ ID NO: 2467 - DNA, 32 bp, Artificial sequence
  Artificial aptamer to IgGm
gcggcgggcgggccacttcgggcatacatggg

SEQ ID NO: 2468 - DNA, 32 bp, Artificial sequence
  Artificial aptamer to IgGm
gcggcggggggtggactatcctagtttagttt

SEQ ID NO: 2469 - DNA, 32 bp, Artificial sequence
  Artificial aptamer to IgGh
gcggcgggtgggtatagggataagaggggcaa

SEQ ID NO: 2470 - DNA, 32 bp, Artificial sequence
  Artificial aptamer to IgGh
gcggcgtatcctttggtgggtggaaggtctga

SEQ ID NO: 2471 - DNA, 32 bp, Artificial sequence
  Artificial aptamer to IgGm
gcggcgtggtaactcaaggatcgccgaaatgg

SEQ ID NO: 2472 - DNA, 32 bp, Artificial sequence
  Artificial aptamer to IgGh
gcgggaggtggtaggaacaggagctgcttacg

SEQ ID NO: 2473 - DNA, 32 bp, Artificial sequence
  Artificial aptamer to IgGh
gcgggatagaaatacggtcggtggtgggggtg

SEQ ID NO: 2474 - DNA, 32 bp, Artificial sequence
  Artificial aptamer to IgGh
gcgggcaaacctgttttttacaaaaacagccc

SEQ ID NO: 2475 - DNA, 32 bp, Artificial sequence
  Artificial aptamer to IgGh
gcggggaggtggttgggtttaaatggtaccta

SEQ ID NO: 2476 - DNA, 32 bp, Artificial sequence
  Artificial aptamer to IgGh
gcggggccctccccgctacggaacgttaagca

SEQ ID NO: 2477 - DNA, 32 bp, Artificial sequence
  Artificial aptamer to IgGm
gcgggggaggggggaatgaggcaacacgaagt

SEQ ID NO: 2478 - DNA, 32 bp, Artificial sequence
  Artificial aptamer to IgGh
gcgggggaggggggcggcaggactgacgaata

SEQ ID NO: 2479 - DNA, 32 bp, Artificial sequence
  Artificial aptamer to IgGm
gcggggggagggaggtcaagagagttacctga

SEQ ID NO: 2480 - DNA, 32 bp, Artificial sequence
  Artificial aptamer to IgGh
gcggggggagggggtgaatcatttcggatagc

SEQ ID NO: 2481 - DNA, 32 bp, Artificial sequence
  Artificial aptamer to IgGh
gcggggggggcggagtgtgcctaatctgtatg

SEQ ID NO: 2482 - DNA, 32 bp, Artificial sequence
  Artificial aptamer to IgGm
gcgggggggtaccgcgctcgttgacggatatg

SEQ ID NO: 2483 - DNA, 32 bp, Artificial sequence
  Artificial aptamer to IgGm
gcggtagtgcacccttaagcaattcttccgca

SEQ ID NO: 2484 - DNA, 32 bp, Artificial sequence
  Artificial aptamer to IgGh
gcggtataggcctcctcgttgaggactatcgc

SEQ ID NO: 2485 - DNA, 32 bp, Artificial sequence
  Artificial aptamer to IgGm
gcggtcatcggtattcataggtggtggggcgg

SEQ ID NO: 2486 - DNA, 32 bp, Artificial sequence
  Artificial aptamer to IgGh
gcggtgataggtcaccatttcaggcgacctga

SEQ ID NO: 2487 - DNA, 32 bp, Artificial sequence
  Artificial aptamer to IgGh
gcggtgcatgtgtctagtcaggcagcggtacg

SEQ ID NO: 2488 - DNA, 32 bp, Artificial sequence
  Artificial aptamer to IgGm
gcggtggcaggaggtgtgtcccagagcggcct

SEQ ID NO: 2489 - DNA, 32 bp, Artificial sequence
  Artificial aptamer to IgGh
gcggtgggatgggggcagtaaaacaggtgtat

SEQ ID NO: 2490 - DNA, 32 bp, Artificial sequence
  Artificial aptamer to IgGh
gcggtggggtgctgagggtggggttctgtggg

SEQ ID NO: 2491 - DNA, 32 bp, Artificial sequence
  Artificial aptamer to IgGm
gcggtggtccgtaggagggggtggctttccga

SEQ ID NO: 2492 - DNA, 32 bp, Artificial sequence
  Artificial aptamer to IgGm
gcgtacaaaagggcgccccaccgggtgctacg

SEQ ID NO: 2493 - DNA, 32 bp, Artificial sequence
  Artificial aptamer to IgGm
gcgtccggcttaagtaggcggatagtcacgaa

SEQ ID NO: 2494 - DNA, 32 bp, Artificial sequence
  Artificial aptamer to IgGh
gcgtggaggtggcggcatactatacctgggga

SEQ ID NO: 2495 - DNA, 32 bp, Artificial sequence
  Artificial aptamer to IgGh
gcgtgggtggcgcgcgtgcagatcacgttgag

SEQ ID NO: 2496 - DNA, 32 bp, Artificial sequence
  Artificial aptamer to IgGm
gcgttaaaacggccgctcgggcctgcggaaat

SEQ ID NO: 2497 - DNA, 32 bp, Artificial sequence
  Artificial aptamer to IgGm
gcgttaggggcaggtaggaggtaaggagttca

SEQ ID NO: 2498 - DNA, 32 bp, Artificial sequence
  Artificial aptamer to IgGm
gctacagggcggaggacaaggggtatctgaat

SEQ ID NO: 2499 - DNA, 32 bp, Artificial sequence
  Artificial aptamer to IgGm
gctactataaagatggggatggtgggggaagt

SEQ ID NO: 2500 - DNA, 32 bp, Artificial sequence
  Artificial aptamer to IgGh
gctaggtcgggggcaggtagaagtacgggggg

SEQ ID NO: 2501 - DNA, 32 bp, Artificial sequence
  Artificial aptamer to IgGm
gctagtagaagttttagggggagggggtggaa

SEQ ID NO: 2502 - DNA, 32 bp, Artificial sequence
  Artificial aptamer to IgGm
gctagtgcggtggagaacttactttctccaat

SEQ ID NO: 2503 - DNA, 32 bp, Artificial sequence
  Artificial aptamer to IgGm
gctagttcatggagggacggggggcagcagtg

SEQ ID NO: 2504 - DNA, 32 bp, Artificial sequence
  Artificial aptamer to IgGh
gctataatctccatgtaagggggcccggcgga

SEQ ID NO: 2505 - DNA, 32 bp, Artificial sequence
  Artificial aptamer to IgGm
gctcatgaaccaatgatgggtggagggaggtg

SEQ ID NO: 2506 - DNA, 32 bp, Artificial sequence
  Artificial aptamer to IgGm
gctccgatgacatcggacgggcaacttgccta

SEQ ID NO: 2507 - DNA, 32 bp, Artificial sequence
  Artificial aptamer to IgGm
gctcctccgcgcacggttaggagacagggggc

SEQ ID NO: 2508 - DNA, 32 bp, Artificial sequence
  Artificial aptamer to IgGm
gctcgcgtggacgtattccacgaagtggtgca

SEQ ID NO: 2509 - DNA, 32 bp, Artificial sequence
  Artificial aptamer to IgGm
gctcgttagagcgagggtcccgtggacgaaga

SEQ ID NO: 2510 - DNA, 32 bp, Artificial sequence
  Artificial aptamer to IgGh
gctctcggaagtcgtcgggccgatctgagagt

SEQ ID NO: 2511 - DNA, 32 bp, Artificial sequence
  Artificial aptamer to IgGh
gctgattacagcgtccaatgctcccattgggt

SEQ ID NO: 2512 - DNA, 32 bp, Artificial sequence
  Artificial aptamer to IgGm
gctgccgagcggtcgcgcggctaccatagcca

SEQ ID NO: 2513 - DNA, 32 bp, Artificial sequence
  Artificial aptamer to IgGh
gctgcttacagcgtccaatgctcccattgggt

SEQ ID NO: 2514 - DNA, 32 bp, Artificial sequence
  Artificial aptamer to IgGm
gctggagggggtggtttcaacaagtactgtta

SEQ ID NO: 2515 - DNA, 32 bp, Artificial sequence
  Artificial aptamer to IgGh
gctggctacagcgtccaatgctcccattgggt

SEQ ID NO: 2516 - DNA, 32 bp, Artificial sequence
  Artificial aptamer to IgGm
gctgggatggtggaggggagatgtgggggttt

SEQ ID NO: 2517 - DNA, 32 bp, Artificial sequence
  Artificial aptamer to IgGm
gctgggctaaaaaacctttgggtatgggtggg

SEQ ID NO: 2518 - DNA, 32 bp, Artificial sequence
  Artificial aptamer to IgGh
gctggttacagcgcccaatgctcccattgggt

SEQ ID NO: 2519 - DNA, 32 bp, Artificial sequence
  Artificial aptamer to IgGh
gctggttacagcgtccaatgctcacattgggt

SEQ ID NO: 2520 - DNA, 32 bp, Artificial sequence
  Artificial aptamer to IgGh
gctggttacagcgtccaatgctcccattgagt

SEQ ID NO: 2521 - DNA, 32 bp, Artificial sequence
  Artificial aptamer to IgGm,IgGh
gctggttacagcgtccaatgctcccattgggc

SEQ ID NO: 2522 - DNA, 32 bp, Artificial sequence
  Artificial aptamer to IgGm,IgGh
gctggttacagcgtccaatgctcccattgggt

SEQ ID NO: 2523 - DNA, 32 bp, Artificial sequence
  Artificial aptamer to IgGh
gctggttacagcgtccaatgctcccgttgggt

SEQ ID NO: 2524 - DNA, 32 bp, Artificial sequence
  Artificial aptamer to IgGm,IgGh
gctggttacagcgtccaatgctcctattgggt

SEQ ID NO: 2525 - DNA, 32 bp, Artificial sequence
  Artificial aptamer to IgGh
gctggttacagcgtccaatgctctcattgggt

SEQ ID NO: 2526 - DNA, 32 bp, Artificial sequence
  Artificial aptamer to IgGh
gctggttacagcgtccaatgcttccattgggt

SEQ ID NO: 2527 - DNA, 32 bp, Artificial sequence
  Artificial aptamer to IgGh
gctggttacagcgtccaatgttcccattgggt

SEQ ID NO: 2528 - DNA, 32 bp, Artificial sequence
  Artificial aptamer to IgGh
gctggttacagcgtgcaatgctcccattgggt

SEQ ID NO: 2529 - DNA, 32 bp, Artificial sequence
  Artificial aptamer to IgGh
gctggttatagcgtccaatgctcccattgggt

SEQ ID NO: 2530 - DNA, 32 bp, Artificial sequence
  Artificial aptamer to IgGh
gctgtggaagtcaagcaatggtcggaggaggt

SEQ ID NO: 2531 - DNA, 32 bp, Artificial sequence
  Artificial aptamer to IgGm
gcttactggacgtacgaggaggaaggggggct

SEQ ID NO: 2532 - DNA, 32 bp, Artificial sequence
  Artificial aptamer to IgGm
gcttagacaccaattactccggtggtgggggt

SEQ ID NO: 2533 - DNA, 32 bp, Artificial sequence
  Artificial aptamer to IgGm
gcttcatgtcactcaataaggtgggggcgggg

SEQ ID NO: 2534 - DNA, 32 bp, Artificial sequence
  Artificial aptamer to IgGh
gctttccgacgtagtgccgcggaaagggtggg

SEQ ID NO: 2535 - DNA, 32 bp, Artificial sequence
  Artificial aptamer to IgGm
ggaacacttcagacttgggttgggggagggtg

SEQ ID NO: 2536 - DNA, 32 bp, Artificial sequence
  Artificial aptamer to IgGm
ggaacatgacggtgggggccgggtaatagatg

SEQ ID NO: 2537 - DNA, 32 bp, Artificial sequence
  Artificial aptamer to IgGh
ggaagggtttttaatctttggtcgggcggagg

SEQ ID NO: 2538 - DNA, 32 bp, Artificial sequence
  Artificial aptamer to IgGh
ggaaggtgttcaggaagggggtgggtaacgag

SEQ ID NO: 2539 - DNA, 32 bp, Artificial sequence
  Artificial aptamer to IgGm
ggaatagggacggtggtggacaaacacatatg

SEQ ID NO: 2540 - DNA, 32 bp, Artificial sequence
  Artificial aptamer to IgGh
ggacaggaggggggccacggggaacagagcca

SEQ ID NO: 2541 - DNA, 32 bp, Artificial sequence
  Artificial aptamer to IgGh
ggacagggggatcgggggaatgttgactagcc

SEQ ID NO: 2542 - DNA, 32 bp, Artificial sequence
  Artificial aptamer to IgGh
ggacgcgaagaggtaggagggggatgggctaa

SEQ ID NO: 2543 - DNA, 32 bp, Artificial sequence
  Artificial aptamer to IgGh
ggacgctatgggtgttgttggtcggaggagga

SEQ ID NO: 2544 - DNA, 32 bp, Artificial sequence
  Artificial aptamer to IgGm
ggacgggtgggggaaaaaggcacccttgaaac

SEQ ID NO: 2545 - DNA, 32 bp, Artificial sequence
  Artificial aptamer to IgGh
ggacgtggtcaaggtgggaggccggagagtag

SEQ ID NO: 2546 - DNA, 32 bp, Artificial sequence
  Artificial aptamer to IgGm
ggagaagaccatattatggggacggcggaggg

SEQ ID NO: 2547 - DNA, 32 bp, Artificial sequence
  Artificial aptamer to IgGh
ggagacactgatggaggatgggtggtgctagc

SEQ ID NO: 2548 - DNA, 32 bp, Artificial sequence
  Artificial aptamer to IgGm
ggagacggagaacagggggggggaaggcgtta

SEQ ID NO: 2549 - DNA, 32 bp, Artificial sequence
  Artificial aptamer to IgGh
ggagatttacgggttcggatggatggagggtg

SEQ ID NO: 2550 - DNA, 32 bp, Artificial sequence
  Artificial aptamer to IgGm
ggaggaggtaaggtaatgggtttggaagttcc

SEQ ID NO: 2551 - DNA, 32 bp, Artificial sequence
  Artificial aptamer to IgGm
ggaggcacgggggtattagggttaggtgcagc

SEQ ID NO: 2552 - DNA, 32 bp, Artificial sequence
  Artificial aptamer to IgGh
ggagggcgggggtgcgccagagaggggatagg

SEQ ID NO: 2553 - DNA, 32 bp, Artificial sequence
  Artificial aptamer to IgGh
ggaggtcggcgggggaaatctcgatcgtttac

SEQ ID NO: 2554 - DNA, 32 bp, Artificial sequence
  Artificial aptamer to IgGm
ggaggtggaggtttttgttgtttcatacaata

SEQ ID NO: 2555 - DNA, 32 bp, Artificial sequence
  Artificial aptamer to IgGm
ggaggtgggggaagagaaatacgtaatgcctc

SEQ ID NO: 2556 - DNA, 32 bp, Artificial sequence
  Artificial aptamer to IgGh
ggagtggcgggggctagagagcgcataggcaa

SEQ ID NO: 2557 - DNA, 32 bp, Artificial sequence
  Artificial aptamer to IgGh
ggagtgggacggaagggggcatcaagttagat

SEQ ID NO: 2558 - DNA, 32 bp, Artificial sequence
  Artificial aptamer to IgGm
ggagttcgaaggcggatggaggcagagaagtg

SEQ ID NO: 2559 - DNA, 32 bp, Artificial sequence
  Artificial aptamer to IgGm
ggataactttcgtccggtggtggaaggtaggc

SEQ ID NO: 2560 - DNA, 32 bp, Artificial sequence
  Artificial aptamer to IgGh
ggatacatcgggtggtaggaaggagaccaatt

SEQ ID NO: 2561 - DNA, 32 bp, Artificial sequence
  Artificial aptamer to IgGh
ggatacggcttagccgtcgagggacttatccc

SEQ ID NO: 2562 - DNA, 32 bp, Artificial sequence
  Artificial aptamer to IgGh
ggatactgtgccgtcaaaaacggcaaactgct

SEQ ID NO: 2563 - DNA, 32 bp, Artificial sequence
  Artificial aptamer to IgGm
ggataggagggggctatgatcaaaagaatacg

SEQ ID NO: 2564 - DNA, 32 bp, Artificial sequence
  Artificial aptamer to IgGh
ggatctggaggaggtggagccggttcattggc

SEQ ID NO: 2565 - DNA, 32 bp, Artificial sequence
  Artificial aptamer to IgGh
ggatgcaacaacgagagcggctcggcatcggg

SEQ ID NO: 2566 - DNA, 32 bp, Artificial sequence
  Artificial aptamer to IgGh
ggattacggctgttattgggtggtaggtgggc

SEQ ID NO: 2567 - DNA, 32 bp, Artificial sequence
  Artificial aptamer to IgGh
ggcaaaccccgggggacggacggtgtgcggtt

SEQ ID NO: 2568 - DNA, 32 bp, Artificial sequence
  Artificial aptamer to IgGm
ggcaagacacacgaattcgttgacattcttgc

SEQ ID NO: 2569 - DNA, 32 bp, Artificial sequence
  Artificial aptamer to IgGm
ggcaattgtgccaggggttatggaaaccactt

SEQ ID NO: 2570 - DNA, 32 bp, Artificial sequence
  Artificial aptamer to IgGm
ggcacgggattccggtgcggaccttttccttc

SEQ ID NO: 2571 - DNA, 32 bp, Artificial sequence
  Artificial aptamer to IgGh
ggcacttggggggtggcatggggacggcaact

SEQ ID NO: 2572 - DNA, 32 bp, Artificial sequence
  Artificial aptamer to IgGh
ggcagagggaggttggcagggtggccacgagg

SEQ ID NO: 2573 - DNA, 32 bp, Artificial sequence
  Artificial aptamer to IgGh
ggcagctccagatgggggggggattggtcggg

SEQ ID NO: 2574 - DNA, 32 bp, Artificial sequence
  Artificial aptamer to IgGh
ggcaggcggtggatgtatgttctttaggtaga

SEQ ID NO: 2575 - DNA, 32 bp, Artificial sequence
  Artificial aptamer to IgGh
ggcatggatggtggaggctcctgataagcgcg

SEQ ID NO: 2576 - DNA, 32 bp, Artificial sequence
  Artificial aptamer to IgGh
ggcatggctcaaatttggaggtcagggggaga

SEQ ID NO: 2577 - DNA, 32 bp, Artificial sequence
  Artificial aptamer to IgGm
ggccaatcttaaggaaggcgcatcgcgggccg

SEQ ID NO: 2578 - DNA, 32 bp, Artificial sequence
  Artificial aptamer to IgGh
ggcccgggtttagggttaggggttaaatgggg

SEQ ID NO: 2579 - DNA, 32 bp, Artificial sequence
  Artificial aptamer to IgGm
ggccgatacgctgcgtggcggtttgcgtcgga

SEQ ID NO: 2580 - DNA, 32 bp, Artificial sequence
  Artificial aptamer to IgGm
ggccggcgggggggataatgtgaagggctaga

SEQ ID NO: 2581 - DNA, 32 bp, Artificial sequence
  Artificial aptamer to IgGm
ggcgaacggcgtccgcgaaggcgttcggattg

SEQ ID NO: 2582 - DNA, 32 bp, Artificial sequence
  Artificial aptamer to IgGh
ggcgatctgtacggccaggcgacggccgcctt

SEQ ID NO: 2583 - DNA, 32 bp, Artificial sequence
  Artificial aptamer to IgGm
ggcgcgagaggaggtgggggatccttgtatgg

SEQ ID NO: 2584 - DNA, 32 bp, Artificial sequence
  Artificial aptamer to IgGh
ggcgcgtattcagatttgaaacgggcaatgcg

SEQ ID NO: 2585 - DNA, 32 bp, Artificial sequence
  Artificial aptamer to IgGm
ggcggatggaacgcgtcaattgcgcggcctat

SEQ ID NO: 2586 - DNA, 32 bp, Artificial sequence
  Artificial aptamer to IgGh
ggcggatggagggaacgatagtattctatgga

SEQ ID NO: 2587 - DNA, 32 bp, Artificial sequence
  Artificial aptamer to IgGh
ggcggcaggaaggtaaagagtattaaaagttt

SEQ ID NO: 2588 - DNA, 32 bp, Artificial sequence
  Artificial aptamer to IgGm
ggcggcggaagggatcctgccctggcattgat

SEQ ID NO: 2589 - DNA, 32 bp, Artificial sequence
  Artificial aptamer to IgGm
ggcggggcggggggcttgaatggctatcaatc

SEQ ID NO: 2590 - DNA, 32 bp, Artificial sequence
  Artificial aptamer to IgGm
ggcgggggggtggatgttgtgctttctagtaa

SEQ ID NO: 2591 - DNA, 32 bp, Artificial sequence
  Artificial aptamer to IgGh
ggcggtatgggggtaataaggcgggcgagagg

SEQ ID NO: 2592 - DNA, 32 bp, Artificial sequence
  Artificial aptamer to IgGh
ggcggtgggggggaaaacgatcagcattccga

SEQ ID NO: 2593 - DNA, 32 bp, Artificial sequence
  Artificial aptamer to IgGh
ggcggtgggggttggtacctgacgggatgatc

SEQ ID NO: 2594 - DNA, 32 bp, Artificial sequence
  Artificial aptamer to IgGh
ggcggtgtgggggaaggaagtaagagagcatg

SEQ ID NO: 2595 - DNA, 32 bp, Artificial sequence
  Artificial aptamer to IgGh
ggcggtttgaacggccgcgaagcggggagccg

SEQ ID NO: 2596 - DNA, 32 bp, Artificial sequence
  Artificial aptamer to IgGh
ggctcgggcttgggcaattttccaagtacgat

SEQ ID NO: 2597 - DNA, 32 bp, Artificial sequence
  Artificial aptamer to IgGh
ggctgggggatggtcagaatcggaagaagcga

SEQ ID NO: 2598 - DNA, 32 bp, Artificial sequence
  Artificial aptamer to IgGh
ggctggtggagggttgttcgtgtcctacaaag

SEQ ID NO: 2599 - DNA, 32 bp, Artificial sequence
  Artificial aptamer to IgGm
ggctggtggatcgggggggcctaagaatgttc

SEQ ID NO: 2600 - DNA, 32 bp, Artificial sequence
  Artificial aptamer to IgGm
ggctgtatggcagtcgttgcgacaacgtcgtt

SEQ ID NO: 2601 - DNA, 32 bp, Artificial sequence
  Artificial aptamer to IgGm
ggcttgtggtggtgggccggcaaactgcatcg

SEQ ID NO: 2602 - DNA, 32 bp, Artificial sequence
  Artificial aptamer to IgGh
gggaacaagcgcgtccggaaactggacgctgt

SEQ ID NO: 2603 - DNA, 32 bp, Artificial sequence
  Artificial aptamer to IgGm
gggaaccgccgtttgcgtgcaagagatcttgc

SEQ ID NO: 2604 - DNA, 32 bp, Artificial sequence
  Artificial aptamer to IgGm
gggaatggaaggaggaatgataagctcgggca

SEQ ID NO: 2605 - DNA, 32 bp, Artificial sequence
  Artificial aptamer to IgGm
gggaattacaatctggaggtggatggcctgga

SEQ ID NO: 2606 - DNA, 32 bp, Artificial sequence
  Artificial aptamer to IgGh
gggactgcgcgagaagggagggcaaagatggg

SEQ ID NO: 2607 - DNA, 32 bp, Artificial sequence
  Artificial aptamer to IgGm
gggacttacgttgaacggaaaacggaagtcaa

SEQ ID NO: 2608 - DNA, 32 bp, Artificial sequence
  Artificial aptamer to IgGm
gggagagtctcgggagggattggggattgagg

SEQ ID NO: 2609 - DNA, 32 bp, Artificial sequence
  Artificial aptamer to IgGh
gggaggtggtccggtacacgcgtgatctccga

SEQ ID NO: 2610 - DNA, 32 bp, Artificial sequence
  Artificial aptamer to IgGm
gggatagaatgtttgggttaatagggagggtg

SEQ ID NO: 2611 - DNA, 32 bp, Artificial sequence
  Artificial aptamer to IgGm
gggcaataatatgggggtgggaggttggtgcg

SEQ ID NO: 2612 - DNA, 32 bp, Artificial sequence
  Artificial aptamer to IgGh
gggcagggggaggtaataaaaatcaaatcgcc

SEQ ID NO: 2613 - DNA, 32 bp, Artificial sequence
  Artificial aptamer to IgGh
gggcatgcgtacaggccctagccatcaaggta

SEQ ID NO: 2614 - DNA, 32 bp, Artificial sequence
  Artificial aptamer to IgGh
gggcatggggggctggagttattcgggacggg

SEQ ID NO: 2615 - DNA, 32 bp, Artificial sequence
  Artificial aptamer to IgGm
gggccaaataatgtgtgtctaacacacagcca

SEQ ID NO: 2616 - DNA, 32 bp, Artificial sequence
  Artificial aptamer to IgGh
gggccaagcttgtcgggagggaggggagaaga

SEQ ID NO: 2617 - DNA, 32 bp, Artificial sequence
  Artificial aptamer to IgGm
gggcccgcaggaggtcggtggttttgtaaagg

SEQ ID NO: 2618 - DNA, 32 bp, Artificial sequence
  Artificial aptamer to IgGm
gggcctaattgggccgatctccgtggacgacg

SEQ ID NO: 2619 - DNA, 32 bp, Artificial sequence
  Artificial aptamer to IgGm
gggcctttatggctcgccaagtgcgcggaagg

SEQ ID NO: 2620 - DNA, 32 bp, Artificial sequence
  Artificial aptamer to IgGh
gggcgcaggtctggtggacggtctcgccggaa

SEQ ID NO: 2621 - DNA, 32 bp, Artificial sequence
  Artificial aptamer to IgGm
gggcgcgctcacgtgcctagatgcaacgtatc

SEQ ID NO: 2622 - DNA, 32 bp, Artificial sequence
  Artificial aptamer to IgGh
gggcggaggatgggactttttcaccatactgg

SEQ ID NO: 2623 - DNA, 32 bp, Artificial sequence
  Artificial aptamer to IgGm
gggcggccggcatacgggtgcttttaatgttc

SEQ ID NO: 2624 - DNA, 32 bp, Artificial sequence
  Artificial aptamer to IgGh
gggcgggcggagtgactcggtggtaaggaggt

SEQ ID NO: 2625 - DNA, 32 bp, Artificial sequence
  Artificial aptamer to IgGh
gggcggggggagggagattggttctctacggg

SEQ ID NO: 2626 - DNA, 32 bp, Artificial sequence
  Artificial aptamer to IgGm
gggcgggtgtttatagttggccgggagggggg

SEQ ID NO: 2627 - DNA, 32 bp, Artificial sequence
  Artificial aptamer to IgGh
gggcggtcaggtggtcttgtagaagggcgaca

SEQ ID NO: 2628 - DNA, 32 bp, Artificial sequence
  Artificial aptamer to IgGh
gggcgtggggggcgaggtggcgactgggttga

SEQ ID NO: 2629 - DNA, 32 bp, Artificial sequence
  Artificial aptamer to IgGh
gggctgttctgtgggggtggaggttgttgtgg

SEQ ID NO: 2630 - DNA, 32 bp, Artificial sequence
  Artificial aptamer to IgGm
ggggacatacggtgcgggctgggccggggttg

SEQ ID NO: 2631 - DNA, 32 bp, Artificial sequence
  Artificial aptamer to IgGh
ggggacgggctcgtgggttcattgtagaaggg

SEQ ID NO: 2632 - DNA, 32 bp, Artificial sequence
  Artificial aptamer to IgGh
ggggaggggggtactagggcctctatgggggt

SEQ ID NO: 2633 - DNA, 32 bp, Artificial sequence
  Artificial aptamer to IgGm
ggggatggcagggtggctacgtgggggccgtc

SEQ ID NO: 2634 - DNA, 32 bp, Artificial sequence
  Artificial aptamer to IgGh
ggggcacaaaaagtagggacttgggcgtaggg

SEQ ID NO: 2635 - DNA, 32 bp, Artificial sequence
  Artificial aptamer to IgGm
ggggccgaccatcggtggtcgcatgctaggcc

SEQ ID NO: 2636 - DNA, 32 bp, Artificial sequence
  Artificial aptamer to IgGm
gggggaccgggatcatcagagggggggacggc

SEQ ID NO: 2637 - DNA, 32 bp, Artificial sequence
  Artificial aptamer to IgGh
gggggaggtacggcgtcatgctttctaaccga

SEQ ID NO: 2638 - DNA, 32 bp, Artificial sequence
  Artificial aptamer to IgGh
gggggcgggggtaaagatcgctgacgtataca

SEQ ID NO: 2639 - DNA, 32 bp, Artificial sequence
  Artificial aptamer to IgGh
ggggggaaatgattggggtgattgaccccaac

SEQ ID NO: 2640 - DNA, 32 bp, Artificial sequence
  Artificial aptamer to IgGm
ggggggacacggtggtacgtaatgtggaaacg

SEQ ID NO: 2641 - DNA, 32 bp, Artificial sequence
  Artificial aptamer to IgGm
ggggggaggtggaaagaatatagcaactattg

SEQ ID NO: 2642 - DNA, 32 bp, Artificial sequence
  Artificial aptamer to IgGh
ggggggcggaggggcgaaaaaaccaggacata

SEQ ID NO: 2643 - DNA, 32 bp, Artificial sequence
  Artificial aptamer to IgGh
gggggggaatcgggctggtggagagagggtgg

SEQ ID NO: 2644 - DNA, 32 bp, Artificial sequence
  Artificial aptamer to IgGh
ggggggggacaggtgcaagcagggtggccgga

SEQ ID NO: 2645 - DNA, 32 bp, Artificial sequence
  Artificial aptamer to IgGm
ggggggggcaaggtgggtaacaatataaatcg

SEQ ID NO: 2646 - DNA, 32 bp, Artificial sequence
  Artificial aptamer to IgGh
ggggggggcggggggtgtgaggaaaggggatc

SEQ ID NO: 2647 - DNA, 32 bp, Artificial sequence
  Artificial aptamer to IgGm
ggggggtgggggaagtgagcatgctcagcggg

SEQ ID NO: 2648 - DNA, 32 bp, Artificial sequence
  Artificial aptamer to IgGh
gggggtggagggatctatttcctgtcttgtcg

SEQ ID NO: 2649 - DNA, 32 bp, Artificial sequence
  Artificial aptamer to IgGm
gggggtggaggggtctgtcatatgaaagaaac

SEQ ID NO: 2650 - DNA, 32 bp, Artificial sequence
  Artificial aptamer to IgGh
gggggtggcgggggaacgcggtgactgttgtt

SEQ ID NO: 2651 - DNA, 32 bp, Artificial sequence
  Artificial aptamer to IgGh
gggggttaggtggtggaggagacaggattacc

SEQ ID NO: 2652 - DNA, 32 bp, Artificial sequence
  Artificial aptamer to IgGm
ggggtacagttgacccatcacgccgtagcgtt

SEQ ID NO: 2653 - DNA, 32 bp, Artificial sequence
  Artificial aptamer to IgGm
ggggtggacggaggatttctaatccgtataag

SEQ ID NO: 2654 - DNA, 32 bp, Artificial sequence
  Artificial aptamer to IgGh
ggggtgggctgatccaagaggcggcggcggac

SEQ ID NO: 2655 - DNA, 32 bp, Artificial sequence
  Artificial aptamer to IgGh
ggggttaggtggaggctagtatagcgacttga

SEQ ID NO: 2656 - DNA, 32 bp, Artificial sequence
  Artificial aptamer to IgGm
gggtcctgtatattagggtgggggccggcagc

SEQ ID NO: 2657 - DNA, 32 bp, Artificial sequence
  Artificial aptamer to IgGm
gggtctcgtaagagaccatcacgcgaccattc

SEQ ID NO: 2658 - DNA, 32 bp, Artificial sequence
  Artificial aptamer to IgGm
gggtcttgggggaggctcgtacatacggcagg

SEQ ID NO: 2659 - DNA, 32 bp, Artificial sequence
  Artificial aptamer to IgGm
gggtgctatctgaacaggtggtggtgggttaa

SEQ ID NO: 2660 - DNA, 32 bp, Artificial sequence
  Artificial aptamer to IgGh
gggtggacctcataattgggccgggctgggag

SEQ ID NO: 2661 - DNA, 32 bp, Artificial sequence
  Artificial aptamer to IgGh
gggtggagggtacaagaactagggggggatgc

SEQ ID NO: 2662 - DNA, 32 bp, Artificial sequence
  Artificial aptamer to IgGh
gggtggcgtggagggtccgcctgtgcgagagg

SEQ ID NO: 2663 - DNA, 32 bp, Artificial sequence
  Artificial aptamer to IgGh
gggtgggggacgttcgggataactgggtcgga

SEQ ID NO: 2664 - DNA, 32 bp, Artificial sequence
  Artificial aptamer to IgGh
gggtgggggcgggtattaaacgcgagcttggg

SEQ ID NO: 2665 - DNA, 32 bp, Artificial sequence
  Artificial aptamer to IgGh
gggtgggggggtggaaatggtctaatgcaccg

SEQ ID NO: 2666 - DNA, 32 bp, Artificial sequence
  Artificial aptamer to IgGm
gggtgtaccataatgggggcggaggggccggt

SEQ ID NO: 2667 - DNA, 32 bp, Artificial sequence
  Artificial aptamer to IgGm
gggtgtatccagacccggggaacggtgggtgg

SEQ ID NO: 2668 - DNA, 32 bp, Artificial sequence
  Artificial aptamer to IgGh
gggttagaaagtgggagggacggaggaagggt

SEQ ID NO: 2669 - DNA, 32 bp, Artificial sequence
  Artificial aptamer to IgGm
gggtttgagtaaccacgtgaataatcgcggcg

SEQ ID NO: 2670 - DNA, 32 bp, Artificial sequence
  Artificial aptamer to IgGh
ggtaaggctaagagtccggagggtggttggcc

SEQ ID NO: 2671 - DNA, 32 bp, Artificial sequence
  Artificial aptamer to IgGm
ggtagcatgaatgcagctaggccactagctct

SEQ ID NO: 2672 - DNA, 32 bp, Artificial sequence
  Artificial aptamer to IgGm
ggtatcaatgatatgaggaaaatctttcctcg

SEQ ID NO: 2673 - DNA, 32 bp, Artificial sequence
  Artificial aptamer to IgGm
ggtcaaagctcgcggggggaggtggagggggt

SEQ ID NO: 2674 - DNA, 32 bp, Artificial sequence
  Artificial aptamer to IgGh
ggtcacttggtttacatttggaggacggtggg

SEQ ID NO: 2675 - DNA, 32 bp, Artificial sequence
  Artificial aptamer to IgGh
ggtcggaatgttttcggggcggtggaggtggg

SEQ ID NO: 2676 - DNA, 32 bp, Artificial sequence
  Artificial aptamer to IgGh
ggtcggtggaggcgagtgcgtgcccatgatac

SEQ ID NO: 2677 - DNA, 32 bp, Artificial sequence
  Artificial aptamer to IgGm
ggtctagaagagatcaccgataccggtggtaa

SEQ ID NO: 2678 - DNA, 32 bp, Artificial sequence
  Artificial aptamer to IgGm
ggtgccggaaaatatcgctgggggtggaggtt

SEQ ID NO: 2679 - DNA, 32 bp, Artificial sequence
  Artificial aptamer to IgGh
ggtggaagcgtcttcgaacctcgagacgcaaa

SEQ ID NO: 2680 - DNA, 32 bp, Artificial sequence
  Artificial aptamer to IgGh
ggtggatggttgggtaagcgggctctccacat

SEQ ID NO: 2681 - DNA, 32 bp, Artificial sequence
  Artificial aptamer to IgGh
ggtgggggagggtagaagaggatagtacagaa

SEQ ID NO: 2682 - DNA, 32 bp, Artificial sequence
  Artificial aptamer to IgGm
ggtgggggatggattgtttctaactgtaggga

SEQ ID NO: 2683 - DNA, 32 bp, Artificial sequence
  Artificial aptamer to IgGm
ggtgggggcaaggtgtggaactgtggagaggt

SEQ ID NO: 2684 - DNA, 32 bp, Artificial sequence
  Artificial aptamer to IgGm
ggtggggggtcgggaacgtatgtctggatcac

SEQ ID NO: 2685 - DNA, 32 bp, Artificial sequence
  Artificial aptamer to IgGh
ggtggtaggaggtaagatattcaaagagttac

SEQ ID NO: 2686 - DNA, 32 bp, Artificial sequence
  Artificial aptamer to IgGm
ggtggtcagccaccgaccgtaaccttgttagg

SEQ ID NO: 2687 - DNA, 32 bp, Artificial sequence
  Artificial aptamer to IgGm
ggtggtccgcgactgtgcgcgagagcaggaga

SEQ ID NO: 2688 - DNA, 32 bp, Artificial sequence
  Artificial aptamer to IgGm
ggtgtagagacttaggggtggaggtgggcaag

SEQ ID NO: 2689 - DNA, 32 bp, Artificial sequence
  Artificial aptamer to IgGm
ggtgttcgggagggcatataacggggcaggga

SEQ ID NO: 2690 - DNA, 32 bp, Artificial sequence
  Artificial aptamer to IgGm
ggttagatgagggtgggggtgggttacgaatc

SEQ ID NO: 2691 - DNA, 32 bp, Artificial sequence
  Artificial aptamer to IgGm
ggttcatagcggcagcatcgggggtttggagg

SEQ ID NO: 2692 - DNA, 32 bp, Artificial sequence
  Artificial aptamer to IgGm
gtaaaacaggggacatgtcctatgtaccccaa

SEQ ID NO: 2693 - DNA, 32 bp, Artificial sequence
  Artificial aptamer to IgGm
gtaaacaggtggactgtttaacgacgcgtata

SEQ ID NO: 2694 - DNA, 32 bp, Artificial sequence
  Artificial aptamer to IgGm
gtaaacggggcccggtatgttcagtcaccggg

SEQ ID NO: 2695 - DNA, 32 bp, Artificial sequence
  Artificial aptamer to IgGm
gtaacaggcggcggatggtgtctggttaggat

SEQ ID NO: 2696 - DNA, 32 bp, Artificial sequence
  Artificial aptamer to IgGm
gtaacgctatacggcgtttctgactgcggtca

SEQ ID NO: 2697 - DNA, 32 bp, Artificial sequence
  Artificial aptamer to IgGh
gtaaggcctcaggatggtggacggccgaagta

SEQ ID NO: 2698 - DNA, 32 bp, Artificial sequence
  Artificial aptamer to IgGm
gtaatgcgggcgttgtaagatggaggcggagg

SEQ ID NO: 2699 - DNA, 32 bp, Artificial sequence
  Artificial aptamer to IgGm
gtacaagcgggacgctcccgctgaaagttcga

SEQ ID NO: 2700 - DNA, 32 bp, Artificial sequence
  Artificial aptamer to IgGm
gtaccatctcgattgcgagttacgtgacgtaa

SEQ ID NO: 2701 - DNA, 32 bp, Artificial sequence
  Artificial aptamer to IgGm
gtaccggatagggcgggggaggattgattgcg

SEQ ID NO: 2702 - DNA, 32 bp, Artificial sequence
  Artificial aptamer to IgGh
gtacgaccatgttacatgttgttggtcgatca

SEQ ID NO: 2703 - DNA, 32 bp, Artificial sequence
  Artificial aptamer to IgGh
gtacgcgaaatgagactgggggcaggtggaca

SEQ ID NO: 2704 - DNA, 32 bp, Artificial sequence
  Artificial aptamer to IgGm
gtacggaggtgcggggggtggtagtgatggta

SEQ ID NO: 2705 - DNA, 32 bp, Artificial sequence
  Artificial aptamer to IgGm
gtacgggacggtggctgggtatctgagtggaa

SEQ ID NO: 2706 - DNA, 32 bp, Artificial sequence
  Artificial aptamer to IgGm
gtacggggcggtcaaggaactgctttgaccgg

SEQ ID NO: 2707 - DNA, 32 bp, Artificial sequence
  Artificial aptamer to IgGm
gtactagccggctttccggagtactaggcatg

SEQ ID NO: 2708 - DNA, 32 bp, Artificial sequence
  Artificial aptamer to IgGm
gtagaagactgcagcttcggtggcggtccggg

SEQ ID NO: 2709 - DNA, 32 bp, Artificial sequence
  Artificial aptamer to IgGm
gtagaaggacggataactgtccttaatgcttc

SEQ ID NO: 2710 - DNA, 32 bp, Artificial sequence
  Artificial aptamer to IgGm
gtagaataacaccccggaaatgttattcagac

SEQ ID NO: 2711 - DNA, 32 bp, Artificial sequence
  Artificial aptamer to IgGm
gtagacggagggggagtggcacggggatggta

SEQ ID NO: 2712 - DNA, 32 bp, Artificial sequence
  Artificial aptamer to IgGh
gtagcggctctaacgtgcgggggtggtgtggg

SEQ ID NO: 2713 - DNA, 32 bp, Artificial sequence
  Artificial aptamer to IgGh
gtaggcacataaaggctatggaggggggaagg

SEQ ID NO: 2714 - DNA, 32 bp, Artificial sequence
  Artificial aptamer to IgGh
gtaggctagctttacggccgcgtcggccgtga

SEQ ID NO: 2715 - DNA, 32 bp, Artificial sequence
  Artificial aptamer to IgGm
gtagggtgatgccaagccaaaacggctaggct

SEQ ID NO: 2716 - DNA, 32 bp, Artificial sequence
  Artificial aptamer to IgGm
gtaggtctgggggaggtggggctggtcttgat

SEQ ID NO: 2717 - DNA, 32 bp, Artificial sequence
  Artificial aptamer to IgGm
gtagtaggatcgaccacttatggtcggacggc

SEQ ID NO: 2718 - DNA, 32 bp, Artificial sequence
  Artificial aptamer to IgGh
gtatgctcataaggaggagggggacctgcaat

SEQ ID NO: 2719 - DNA, 32 bp, Artificial sequence
  Artificial aptamer to IgGh
gtatggcaagaacgtaagcgcgtaaatcttgc

SEQ ID NO: 2720 - DNA, 32 bp, Artificial sequence
  Artificial aptamer to IgGh
gtatggcgccttgcgtaatacgcgtgggcctc

SEQ ID NO: 2721 - DNA, 32 bp, Artificial sequence
  Artificial aptamer to IgGm
gtatgtgcaggatggttggctgggggttattc

SEQ ID NO: 2722 - DNA, 32 bp, Artificial sequence
  Artificial aptamer to IgGh
gtcaagagtgtacggaggaaaggcgggggcta

SEQ ID NO: 2723 - DNA, 32 bp, Artificial sequence
  Artificial aptamer to IgGm
gtcacaagcgaatgatggggggatggaggact

SEQ ID NO: 2724 - DNA, 32 bp, Artificial sequence
  Artificial aptamer to IgGm
gtcacgctcataatcggggggttggctggtat

SEQ ID NO: 2725 - DNA, 32 bp, Artificial sequence
  Artificial aptamer to IgGm
gtcagcgctcccagacggatttcgctgggtat

SEQ ID NO: 2726 - DNA, 32 bp, Artificial sequence
  Artificial aptamer to IgGh
gtcagctatttcaaattacggctggtggttgg

SEQ ID NO: 2727 - DNA, 32 bp, Artificial sequence
  Artificial aptamer to IgGm
gtcatatggatgtaaggagggggtggagtgtt

SEQ ID NO: 2728 - DNA, 32 bp, Artificial sequence
  Artificial aptamer to IgGm
gtccaaggatataattggtgggctggtgggat

SEQ ID NO: 2729 - DNA, 32 bp, Artificial sequence
  Artificial aptamer to IgGm
gtccaataatgcggacacccgttcacggggat

SEQ ID NO: 2730 - DNA, 32 bp, Artificial sequence
  Artificial aptamer to IgGh
gtccggtgggtgggggaaagaatgtaagccat

SEQ ID NO: 2731 - DNA, 32 bp, Artificial sequence
  Artificial aptamer to IgGh
gtccttactggtctggagggggtgacgggctg

SEQ ID NO: 2732 - DNA, 32 bp, Artificial sequence
  Artificial aptamer to IgGh
gtcgaaaacagaaggttggtggatggagctat

SEQ ID NO: 2733 - DNA, 32 bp, Artificial sequence
  Artificial aptamer to IgGm
gtcgaaattattggaggaagggggaagctgta

SEQ ID NO: 2734 - DNA, 32 bp, Artificial sequence
  Artificial aptamer to IgGm
gtcgaagggagatgtgtctcggtagggggcgg

SEQ ID NO: 2735 - DNA, 32 bp, Artificial sequence
  Artificial aptamer to IgGh
gtcgatggcttaaaactagggggttggtggag

SEQ ID NO: 2736 - DNA, 32 bp, Artificial sequence
  Artificial aptamer to IgGh
gtcgcactacacaccgagtgggggtggaggtt

SEQ ID NO: 2737 - DNA, 32 bp, Artificial sequence
  Artificial aptamer to IgGm
gtcgcagcaacgttctgtacgtgcgaatgatc

SEQ ID NO: 2738 - DNA, 32 bp, Artificial sequence
  Artificial aptamer to IgGh
gtcgcctgatgtacgggcacatgatcgggcgt

SEQ ID NO: 2739 - DNA, 32 bp, Artificial sequence
  Artificial aptamer to IgGh
gtcggatgaggaggggggggcaacgtctaacg

SEQ ID NO: 2740 - DNA, 32 bp, Artificial sequence
  Artificial aptamer to IgGm
gtcgggggggaggcggggagcaattgaggttt

SEQ ID NO: 2741 - DNA, 32 bp, Artificial sequence
  Artificial aptamer to IgGh
gtcgggttgcgactacagcgccattttggcat

SEQ ID NO: 2742 - DNA, 32 bp, Artificial sequence
  Artificial aptamer to IgGm
gtcgtttcgttaaacgagctaacgacaaccga

SEQ ID NO: 2743 - DNA, 32 bp, Artificial sequence
  Artificial aptamer to IgGh
gtctaactcatcaccacccaatacaggtgatg

SEQ ID NO: 2744 - DNA, 32 bp, Artificial sequence
  Artificial aptamer to IgGh
gtctaggacggatggagggtatgacaaataca

SEQ ID NO: 2745 - DNA, 32 bp, Artificial sequence
  Artificial aptamer to IgGm
gtctgggtggacggccggtgaataaactcaat

SEQ ID NO: 2746 - DNA, 32 bp, Artificial sequence
  Artificial aptamer to IgGm
gtctgtacaggggtgggatggtgggatcagcg

SEQ ID NO: 2747 - DNA, 32 bp, Artificial sequence
  Artificial aptamer to IgGm
gtcttaagatccctaacggcggcaggagggga

SEQ ID NO: 2748 - DNA, 32 bp, Artificial sequence
  Artificial aptamer to IgGm
gtgaaagaacgtgcgggggggggggacactca

SEQ ID NO: 2749 - DNA, 32 bp, Artificial sequence
  Artificial aptamer to IgGh
gtgaaggaataggaggaaggatggcatccgaa

SEQ ID NO: 2750 - DNA, 32 bp, Artificial sequence
  Artificial aptamer to IgGm
gtgacaataacatgtcacacacggccccacca

SEQ ID NO: 2751 - DNA, 32 bp, Artificial sequence
  Artificial aptamer to IgGm
gtgattgttgactgttggaggcggccgggatg

SEQ ID NO: 2752 - DNA, 32 bp, Artificial sequence
  Artificial aptamer to IgGm
gtgcaactgcgtgatgaacacgctacaacttc

SEQ ID NO: 2753 - DNA, 32 bp, Artificial sequence
  Artificial aptamer to IgGh
gtgcaggggagaaatgtggaggggggggattg

SEQ ID NO: 2754 - DNA, 32 bp, Artificial sequence
  Artificial aptamer to IgGm
gtgccacttggctattggcgggtggtgggatg

SEQ ID NO: 2755 - DNA, 32 bp, Artificial sequence
  Artificial aptamer to IgGh
gtgcgggctctaacggaggtggcgggaagacg

SEQ ID NO: 2756 - DNA, 32 bp, Artificial sequence
  Artificial aptamer to IgGh
gtgcggtcggtgggggcctcagcgagaacaaa

SEQ ID NO: 2757 - DNA, 32 bp, Artificial sequence
  Artificial aptamer to IgGm
gtgcggtgctctcgtttgcactaacgcaatgg

SEQ ID NO: 2758 - DNA, 32 bp, Artificial sequence
  Artificial aptamer to IgGh
gtgcgttggctgtcaaactggtggtggcggtc

SEQ ID NO: 2759 - DNA, 32 bp, Artificial sequence
  Artificial aptamer to IgGh
gtgctcatgcaatcgggggctgtcacgattgc

SEQ ID NO: 2760 - DNA, 32 bp, Artificial sequence
  Artificial aptamer to IgGh
gtgctggaggagtggtggtacgtctgttgtag

SEQ ID NO: 2761 - DNA, 32 bp, Artificial sequence
  Artificial aptamer to IgGm
gtgctggagtggaggtggctaaaagggtctcc

SEQ ID NO: 2762 - DNA, 32 bp, Artificial sequence
  Artificial aptamer to IgGm
gtggagaggcaggacggccggagcgaatttcg

SEQ ID NO: 2763 - DNA, 32 bp, Artificial sequence
  Artificial aptamer to IgGh
gtggatggtggagggcagctaacgttgcaaga

SEQ ID NO: 2764 - DNA, 32 bp, Artificial sequence
  Artificial aptamer to IgGh
gtggccccgaaaactcggctgaagccgatggg

SEQ ID NO: 2765 - DNA, 32 bp, Artificial sequence
  Artificial aptamer to IgGh
gtggcgattcgcttaccgggggtggagggtag

SEQ ID NO: 2766 - DNA, 32 bp, Artificial sequence
  Artificial aptamer to IgGm
gtggcggagccagatgcgtgcaatgaaccacg

SEQ ID NO: 2767 - DNA, 32 bp, Artificial sequence
  Artificial aptamer to IgGh
gtggctcgcggtttacccggtggacgggggac

SEQ ID NO: 2768 - DNA, 32 bp, Artificial sequence
  Artificial aptamer to IgGh
gtgggcgggtggagtaagggaaagggtaatgt

SEQ ID NO: 2769 - DNA, 32 bp, Artificial sequence
  Artificial aptamer to IgGh
gtggggaagagtgatgtacgggaagggagggg

SEQ ID NO: 2770 - DNA, 32 bp, Artificial sequence
  Artificial aptamer to IgGh
gtgggggcgagggggatgtctgggctaacaat

SEQ ID NO: 2771 - DNA, 32 bp, Artificial sequence
  Artificial aptamer to IgGm
gtgggtttccaaacgccgaaatacgtaaaccc

SEQ ID NO: 2772 - DNA, 32 bp, Artificial sequence
  Artificial aptamer to IgGh
gtggtaggtggtcggggggaagtatgcctgtg

SEQ ID NO: 2773 - DNA, 32 bp, Artificial sequence
  Artificial aptamer to IgGm
gtggtggggggacgggagtagcagccatggta

SEQ ID NO: 2774 - DNA, 32 bp, Artificial sequence
  Artificial aptamer to IgGm
gtgtcgggatcccccgtctaacacttaaggtg

SEQ ID NO: 2775 - DNA, 32 bp, Artificial sequence
  Artificial aptamer to IgGh
gtgttccgaagtcttggagggggcgggcgagg

SEQ ID NO: 2776 - DNA, 32 bp, Artificial sequence
  Artificial aptamer to IgGm
gttactgaaaggggattgccccctttactata

SEQ ID NO: 2777 - DNA, 32 bp, Artificial sequence
  Artificial aptamer to IgGh
gttatgtagccgcataaaggaaggatggtggg

SEQ ID NO: 2778 - DNA, 32 bp, Artificial sequence
  Artificial aptamer to IgGm
gttcagcagtaaccggaggaggacaggcaact

SEQ ID NO: 2779 - DNA, 32 bp, Artificial sequence
  Artificial aptamer to IgGm
gttcaggaggtggcgtggaatatccggggaca

SEQ ID NO: 2780 - DNA, 32 bp, Artificial sequence
  Artificial aptamer to IgGm
gttcaggcgcagagctaccggcgcttgactac

SEQ ID NO: 2781 - DNA, 32 bp, Artificial sequence
  Artificial aptamer to IgGh
gttcggcacagcagcgaaatatattcgcacga

SEQ ID NO: 2782 - DNA, 32 bp, Artificial sequence
  Artificial aptamer to IgGh
gttcggttagggtattttgggatacgggaggg

SEQ ID NO: 2783 - DNA, 32 bp, Artificial sequence
  Artificial aptamer to IgGh
gttctgaagggtggtggtccggatatcattgt

SEQ ID NO: 2784 - DNA, 32 bp, Artificial sequence
  Artificial aptamer to IgGm
gttgactcgagcaccaacagcggattccgctt

SEQ ID NO: 2785 - DNA, 32 bp, Artificial sequence
  Artificial aptamer to IgGm
gttgattctcgccatgggtggaggaggaaaca

SEQ ID NO: 2786 - DNA, 32 bp, Artificial sequence
  Artificial aptamer to IgGm
gttgcacttgggaaggttggtgggcagggtgt

SEQ ID NO: 2787 - DNA, 32 bp, Artificial sequence
  Artificial aptamer to IgGh
gttgcgtctccttttgaatggatgggggtgga

SEQ ID NO: 2788 - DNA, 32 bp, Artificial sequence
  Artificial aptamer to IgGh
gttgggccacgggggtggatgcggcatgtggc

SEQ ID NO: 2789 - DNA, 32 bp, Artificial sequence
  Artificial aptamer to IgGm
gttgtcgtttcattgggctggcgggtaggggg

SEQ ID NO: 2790 - DNA, 32 bp, Artificial sequence
  Artificial aptamer to IgGm
gttgtgggtgggccagtggtatcgggttggga

SEQ ID NO: 2791 - DNA, 32 bp, Artificial sequence
  Artificial aptamer to IgGh
gtttgcgccgtgcaagggagggttggctggtg

SEQ ID NO: 2792 - DNA, 32 bp, Artificial sequence
  Artificial aptamer to IgGm
taaaaatacccatgcacgaaggccgtgcaact

SEQ ID NO: 2793 - DNA, 32 bp, Artificial sequence
  Artificial aptamer to IgGh
taaaggtggtggaggtgtagattgcttgtctc

SEQ ID NO: 2794 - DNA, 32 bp, Artificial sequence
  Artificial aptamer to IgGh
taacaggggctttgtatctgggggtggaatgg

SEQ ID NO: 2795 - DNA, 32 bp, Artificial sequence
  Artificial aptamer to IgGm
taacatcgcccaaggtttgggcaatccatggc

SEQ ID NO: 2796 - DNA, 32 bp, Artificial sequence
  Artificial aptamer to IgGm
taacggggatccgccccgcaaacgtaccgccc

SEQ ID NO: 2797 - DNA, 32 bp, Artificial sequence
  Artificial aptamer to IgGh
taacgggtcttgcccgcttggtcgataagaca

SEQ ID NO: 2798 - DNA, 32 bp, Artificial sequence
  Artificial aptamer to IgGm
taagcatagcgtcgttccaacgggggcggggg

SEQ ID NO: 2799 - DNA, 32 bp, Artificial sequence
  Artificial aptamer to IgGh
taagggacgggcgggaataagtcaagggaaac

SEQ ID NO: 2800 - DNA, 32 bp, Artificial sequence
  Artificial aptamer to IgGm
taaggggaggacgggggatagatgagaggaaa

SEQ ID NO: 2801 - DNA, 32 bp, Artificial sequence
  Artificial aptamer to IgGm
taaggtggaggatgggggtacacaatacttgc

SEQ ID NO: 2802 - DNA, 32 bp, Artificial sequence
  Artificial aptamer to IgGh
taatactggattttgtttcgggggatgggtgg

SEQ ID NO: 2803 - DNA, 32 bp, Artificial sequence
  Artificial aptamer to IgGm
tacacctaactcaacgtcgggagcgcgttgat

SEQ ID NO: 2804 - DNA, 32 bp, Artificial sequence
  Artificial aptamer to IgGm
taccagcgatcgcagcgtaaccgacgcacgcg

SEQ ID NO: 2805 - DNA, 32 bp, Artificial sequence
  Artificial aptamer to IgGm
taccagcggaggtggcggtcgatcgtccagaa

SEQ ID NO: 2806 - DNA, 32 bp, Artificial sequence
  Artificial aptamer to IgGm
tacccagcggtatgggtggaaaggacggcgga

SEQ ID NO: 2807 - DNA, 32 bp, Artificial sequence
  Artificial aptamer to IgGm
taccctaaatcccgccggaggagtggaggaga

SEQ ID NO: 2808 - DNA, 32 bp, Artificial sequence
  Artificial aptamer to IgGh
taccgggatgtctcaggttggacgggggacgg

SEQ ID NO: 2809 - DNA, 32 bp, Artificial sequence
  Artificial aptamer to IgGm
tacgaaaatcgagttaaatcggtggttggtgg

SEQ ID NO: 2810 - DNA, 32 bp, Artificial sequence
  Artificial aptamer to IgGh
tacgaggcggcccggaggtggatcgatccagc

SEQ ID NO: 2811 - DNA, 32 bp, Artificial sequence
  Artificial aptamer to IgGh
tacgcacaggatggtggtggattatgccattt

SEQ ID NO: 2812 - DNA, 32 bp, Artificial sequence
  Artificial aptamer to IgGh
tacgcatccggagatggaggcggggggatttg

SEQ ID NO: 2813 - DNA, 32 bp, Artificial sequence
  Artificial aptamer to IgGh
tacgccggcgcaaatgcagggatagcatttga

SEQ ID NO: 2814 - DNA, 32 bp, Artificial sequence
  Artificial aptamer to IgGh
tacgcgaggtggaggatggaatttaaatgtca

SEQ ID NO: 2815 - DNA, 32 bp, Artificial sequence
  Artificial aptamer to IgGm
tacggcatgcacagagtgcgtgcaaagatcct

SEQ ID NO: 2816 - DNA, 32 bp, Artificial sequence
  Artificial aptamer to IgGm
tacggggtcacccgagctattccttgcttgta

SEQ ID NO: 2817 - DNA, 32 bp, Artificial sequence
  Artificial aptamer to IgGm
tacgggtgtaggctttccctattttcgcccgt

SEQ ID NO: 2818 - DNA, 32 bp, Artificial sequence
  Artificial aptamer to IgGm
tacggtagggggggggaagtttgggacaagat

SEQ ID NO: 2819 - DNA, 32 bp, Artificial sequence
  Artificial aptamer to IgGm
tacggtgggaaggaggaggacgagcggtttac

SEQ ID NO: 2820 - DNA, 32 bp, Artificial sequence
  Artificial aptamer to IgGh
tacggtggggcgacaagtgcttcctaaagcac

SEQ ID NO: 2821 - DNA, 32 bp, Artificial sequence
  Artificial aptamer to IgGm
tacgtggggggctgggaggagctccttaatct

SEQ ID NO: 2822 - DNA, 32 bp, Artificial sequence
  Artificial aptamer to IgGm
tactagggaggggggtggttacaattagggga

SEQ ID NO: 2823 - DNA, 32 bp, Artificial sequence
  Artificial aptamer to IgGh
tactcgtgtgagggggggggccggcgcgaaca

SEQ ID NO: 2824 - DNA, 32 bp, Artificial sequence
  Artificial aptamer to IgGm
tagaagggtgggaggaaggctgttcctattcc

SEQ ID NO: 2825 - DNA, 32 bp, Artificial sequence
  Artificial aptamer to IgGm
tagagggatctaggaggttcccacctccaagg

SEQ ID NO: 2826 - DNA, 32 bp, Artificial sequence
  Artificial aptamer to IgGm
tagccacgggtatcccggacggtgtttggcaa

SEQ ID NO: 2827 - DNA, 32 bp, Artificial sequence
  Artificial aptamer to IgGh
tagcctacagttattgtgtgctaatgcacacg

SEQ ID NO: 2828 - DNA, 32 bp, Artificial sequence
  Artificial aptamer to IgGh
tagcgccccgcatgggcttgtccgtttgtcgg

SEQ ID NO: 2829 - DNA, 32 bp, Artificial sequence
  Artificial aptamer to IgGm
taggaaaccgccgtagaatacggcgacacttg

SEQ ID NO: 2830 - DNA, 32 bp, Artificial sequence
  Artificial aptamer to IgGh
taggacggacatcggtgggagggggtaagaga

SEQ ID NO: 2831 - DNA, 32 bp, Artificial sequence
  Artificial aptamer to IgGh
taggagaatagcgaaaggaggtcggaggttgg

SEQ ID NO: 2832 - DNA, 32 bp, Artificial sequence
  Artificial aptamer to IgGh
taggggccagacccggtggtcgtggaggcaca

SEQ ID NO: 2833 - DNA, 32 bp, Artificial sequence
  Artificial aptamer to IgGm
taggggctggatgggccattggatgggaaggg

SEQ ID NO: 2834 - DNA, 32 bp, Artificial sequence
  Artificial aptamer to IgGh
taggtggcaaatgccgatcatagcatttgctc

SEQ ID NO: 2835 - DNA, 32 bp, Artificial sequence
  Artificial aptamer to IgGm
taggtgggtgcgtgaaacgaaagtacgtttca

SEQ ID NO: 2836 - DNA, 32 bp, Artificial sequence
  Artificial aptamer to IgGh
tagtgcacactgatggtggcggcggaggaaga

SEQ ID NO: 2837 - DNA, 32 bp, Artificial sequence
  Artificial aptamer to IgGm
tagtgcggatcacggaggttggtggttatggg

SEQ ID NO: 2838 - DNA, 32 bp, Artificial sequence
  Artificial aptamer to IgGh
tagtggtggttggggggtaataaagaatttaa

SEQ ID NO: 2839 - DNA, 32 bp, Artificial sequence
  Artificial aptamer to IgGh
tagtgtaatcctggaggcggcggctacgacta

SEQ ID NO: 2840 - DNA, 32 bp, Artificial sequence
  Artificial aptamer to IgGh
tatcgctgctctcagcccattcattagcagcg

SEQ ID NO: 2841 - DNA, 32 bp, Artificial sequence
  Artificial aptamer to IgGh
tatgcgtctgttaggaaggtgggggtgtaatg

SEQ ID NO: 2842 - DNA, 32 bp, Artificial sequence
  Artificial aptamer to IgGh
tatggggagatcataccagtcaagaagactgg

SEQ ID NO: 2843 - DNA, 32 bp, Artificial sequence
  Artificial aptamer to IgGm
tatggtaaggaggaggagcaacagacactatc

SEQ ID NO: 2844 - DNA, 32 bp, Artificial sequence
  Artificial aptamer to IgGh
tcaaaggcggacgggggtagcattcgcaaccg

SEQ ID NO: 2845 - DNA, 32 bp, Artificial sequence
  Artificial aptamer to IgGh
tcacacggggagtagggttgggaggaggggcg

SEQ ID NO: 2846 - DNA, 32 bp, Artificial sequence
  Artificial aptamer to IgGm
tcacagtggaaggcggcaggtatacaatgaga

SEQ ID NO: 2847 - DNA, 32 bp, Artificial sequence
  Artificial aptamer to IgGh
tcacatgcatcctttctttgggggggggcggg

SEQ ID NO: 2848 - DNA, 32 bp, Artificial sequence
  Artificial aptamer to IgGh
tcaccagtagggtgaggcgttgggagaaacga

SEQ ID NO: 2849 - DNA, 32 bp, Artificial sequence
  Artificial aptamer to IgGm
tcacgacggtgcatgtacatcgtgcacgaacc

SEQ ID NO: 2850 - DNA, 32 bp, Artificial sequence
  Artificial aptamer to IgGh
tcacgcactcgggggaaggttggatgtcctgg

SEQ ID NO: 2851 - DNA, 32 bp, Artificial sequence
  Artificial aptamer to IgGm
tcacgggataatgttgtggtggggtgggggga

SEQ ID NO: 2852 - DNA, 32 bp, Artificial sequence
  Artificial aptamer to IgGm
tcagaacatgaaatgaaggtggcgtggagggc

SEQ ID NO: 2853 - DNA, 32 bp, Artificial sequence
  Artificial aptamer to IgGh
tcagagtaactttgggcagttccggactctga

SEQ ID NO: 2854 - DNA, 32 bp, Artificial sequence
  Artificial aptamer to IgGh
tcagatgtgtaacggcagcggggggggtggaa

SEQ ID NO: 2855 - DNA, 32 bp, Artificial sequence
  Artificial aptamer to IgGh
tcagcgaacgcaccaatgtgcagatcgcgttg

SEQ ID NO: 2856 - DNA, 32 bp, Artificial sequence
  Artificial aptamer to IgGh
tcaggcggaggtatggatcttaacaagctcgc

SEQ ID NO: 2857 - DNA, 32 bp, Artificial sequence
  Artificial aptamer to IgGh
tcagtattttcggcgcggtggaggcgactaag

SEQ ID NO: 2858 - DNA, 32 bp, Artificial sequence
  Artificial aptamer to IgGh
tcatagggggggactttggtcgggggtggacg

SEQ ID NO: 2859 - DNA, 32 bp, Artificial sequence
  Artificial aptamer to IgGm
tcatgaatggtgctctcataccattcttcttc

SEQ ID NO: 2860 - DNA, 32 bp, Artificial sequence
  Artificial aptamer to IgGh
tcatgagggaggggtaatgggattggatggga

SEQ ID NO: 2861 - DNA, 32 bp, Artificial sequence
  Artificial aptamer to IgGh
tccaaaaagcgtacaaggtagggggtgggtac

SEQ ID NO: 2862 - DNA, 32 bp, Artificial sequence
  Artificial aptamer to IgGm
tccaacgagcgcacgcgtgagagcagacgcgt

SEQ ID NO: 2863 - DNA, 32 bp, Artificial sequence
  Artificial aptamer to IgGm
tccaagacatctcgaaggcaggaggacggttc

SEQ ID NO: 2864 - DNA, 32 bp, Artificial sequence
  Artificial aptamer to IgGh
tccaagtgatttggtaggtcggcggctgtcat

SEQ ID NO: 2865 - DNA, 32 bp, Artificial sequence
  Artificial aptamer to IgGm
tccaattaagacgggatttaggtggctggtgg

SEQ ID NO: 2866 - DNA, 32 bp, Artificial sequence
  Artificial aptamer to IgGh
tccacaaatggtgcgcgcaactaacgtcgcaa

SEQ ID NO: 2867 - DNA, 32 bp, Artificial sequence
  Artificial aptamer to IgGh
tccacgagctaagagagaagctccagtggggc

SEQ ID NO: 2868 - DNA, 32 bp, Artificial sequence
  Artificial aptamer to IgGh
tccatcacgggtcttggagggcggatggacca

SEQ ID NO: 2869 - DNA, 32 bp, Artificial sequence
  Artificial aptamer to IgGh
tccatggtgtagccgggggtatggcggtgccg

SEQ ID NO: 2870 - DNA, 32 bp, Artificial sequence
  Artificial aptamer to IgGh
tccattgggtatggccagacggcgggggttgg

SEQ ID NO: 2871 - DNA, 32 bp, Artificial sequence
  Artificial aptamer to IgGm
tcccaaagcgcgagaatcacgggggtggtggg

SEQ ID NO: 2872 - DNA, 32 bp, Artificial sequence
  Artificial aptamer to IgGm
tcccagggtaggacggaggaggtgggttgggc

SEQ ID NO: 2873 - DNA, 32 bp, Artificial sequence
  Artificial aptamer to IgGm
tcccattgacaaactgaatgtcaaagagtggg

SEQ ID NO: 2874 - DNA, 32 bp, Artificial sequence
  Artificial aptamer to IgGh
tccccgtgggaggcggtggtaaacacagcttg

SEQ ID NO: 2875 - DNA, 32 bp, Artificial sequence
  Artificial aptamer to IgGm
tcccgatcacgccccgacttaaccggacggcg

SEQ ID NO: 2876 - DNA, 32 bp, Artificial sequence
  Artificial aptamer to IgGh
tcccgcaccggggaactgtacggtgaggtggg

SEQ ID NO: 2877 - DNA, 32 bp, Artificial sequence
  Artificial aptamer to IgGm
tcccgcagtgaggacaatcacagcgtgcgggg

SEQ ID NO: 2878 - DNA, 32 bp, Artificial sequence
  Artificial aptamer to IgGm
tcccgctcgaaaagagaataagtctgcgggtg

SEQ ID NO: 2879 - DNA, 32 bp, Artificial sequence
  Artificial aptamer to IgGh
tcccgggcggataggtggcgcacatagataca

SEQ ID NO: 2880 - DNA, 32 bp, Artificial sequence
  Artificial aptamer to IgGm
tccctagaggctagagaagcgtttcgcgcctc

SEQ ID NO: 2881 - DNA, 32 bp, Artificial sequence
  Artificial aptamer to IgGm
tccctcgctaggataatgcaggaagcctgctc

SEQ ID NO: 2882 - DNA, 32 bp, Artificial sequence
  Artificial aptamer to IgGm
tccctgggattagtgtaatcccaaaccgtgtg

SEQ ID NO: 2883 - DNA, 32 bp, Artificial sequence
  Artificial aptamer to IgGm
tccgccactcggtagagaggccccaccgagta

SEQ ID NO: 2884 - DNA, 32 bp, Artificial sequence
  Artificial aptamer to IgGh
tccgccgcattacgtgcggcatcggcacggtc

SEQ ID NO: 2885 - DNA, 32 bp, Artificial sequence
  Artificial aptamer to IgGh
tccgccgcgcatgcggaggagggtctcaaggt

SEQ ID NO: 2886 - DNA, 32 bp, Artificial sequence
  Artificial aptamer to IgGh
tccgcctgaaccggtgggggtggaaagcatcg

SEQ ID NO: 2887 - DNA, 32 bp, Artificial sequence
  Artificial aptamer to IgGm
tccgggactgcaattctttaattgcatgggtt

SEQ ID NO: 2888 - DNA, 32 bp, Artificial sequence
  Artificial aptamer to IgGh
tccggggtccagggatgggggggacgggggaa

SEQ ID NO: 2889 - DNA, 32 bp, Artificial sequence
  Artificial aptamer to IgGh
tccggtaccccgtctgcactaggcagcagaac

SEQ ID NO: 2890 - DNA, 32 bp, Artificial sequence
  Artificial aptamer to IgGm
tccgtagattatggaggagggcggatgatcaa

SEQ ID NO: 2891 - DNA, 32 bp, Artificial sequence
  Artificial aptamer to IgGm
tcctcctcacggactgtccgcggcacggcaga

SEQ ID NO: 2892 - DNA, 32 bp, Artificial sequence
  Artificial aptamer to IgGh
tcctcgcttctgtagttcgaatgctgcgaggt

SEQ ID NO: 2893 - DNA, 32 bp, Artificial sequence
  Artificial aptamer to IgGm
tcctcggcgagaaacctgcagaacgcaggcta

SEQ ID NO: 2894 - DNA, 32 bp, Artificial sequence
  Artificial aptamer to IgGm
tcctgtggcggagggtggatcagaaaacaacc

SEQ ID NO: 2895 - DNA, 32 bp, Artificial sequence
  Artificial aptamer to IgGh
tcgaagatagcaccccaagggtggcgggggaa

SEQ ID NO: 2896 - DNA, 32 bp, Artificial sequence
  Artificial aptamer to IgGh
tcgactggtcggaggtggtcatatggtcatcg

SEQ ID NO: 2897 - DNA, 32 bp, Artificial sequence
  Artificial aptamer to IgGm
tcgagctcgttctcaggcggaaggtggttaag

SEQ ID NO: 2898 - DNA, 32 bp, Artificial sequence
  Artificial aptamer to IgGh
tcgatcggtgacgacggatgggatggggggga

SEQ ID NO: 2899 - DNA, 32 bp, Artificial sequence
  Artificial aptamer to IgGh
tcgatgggacggcgggtggtaacgagggagag

SEQ ID NO: 2900 - DNA, 32 bp, Artificial sequence
  Artificial aptamer to IgGm
tcgcagtaccatcattgcctttaggtactgta

SEQ ID NO: 2901 - DNA, 32 bp, Artificial sequence
  Artificial aptamer to IgGh
tcgcgaggtggcgggggtcgaatgagtcagtc

SEQ ID NO: 2902 - DNA, 32 bp, Artificial sequence
  Artificial aptamer to IgGh
tcgcggacgaacgcgtgtatatttttcacgct

SEQ ID NO: 2903 - DNA, 32 bp, Artificial sequence
  Artificial aptamer to IgGm
tcgcggggtacgggtccgggtctcacacaggg

SEQ ID NO: 2904 - DNA, 32 bp, Artificial sequence
  Artificial aptamer to IgGh
tcgcgtatggaggtgtgggggtttcaacttga

SEQ ID NO: 2905 - DNA, 32 bp, Artificial sequence
  Artificial aptamer to IgGm
tcgctaggtggaggaaggtctatggcactctc

SEQ ID NO: 2906 - DNA, 32 bp, Artificial sequence
  Artificial aptamer to IgGm
tcgctgggtggggattgggattgtctggggag

SEQ ID NO: 2907 - DNA, 32 bp, Artificial sequence
  Artificial aptamer to IgGh
tcggacacagagatgggcaactgtgtcgtaac

SEQ ID NO: 2908 - DNA, 32 bp, Artificial sequence
  Artificial aptamer to IgGm
tcggagccgcaaacattatggcatggcggcgt

SEQ ID NO: 2909 - DNA, 32 bp, Artificial sequence
  Artificial aptamer to IgGm
tcggaggagggggagtaaaacgtgcaagggga

SEQ ID NO: 2910 - DNA, 32 bp, Artificial sequence
  Artificial aptamer to IgGm
tcggaggcgggttggtagagaggattacgaag

SEQ ID NO: 2911 - DNA, 32 bp, Artificial sequence
  Artificial aptamer to IgGh
tcggatgggaggtggtcaaatctagcttttca

SEQ ID NO: 2912 - DNA, 32 bp, Artificial sequence
  Artificial aptamer to IgGh
tcggcagcttcgccgaaacacgaacacttgtg

SEQ ID NO: 2913 - DNA, 32 bp, Artificial sequence
  Artificial aptamer to IgGh
tcggcagggtggagggtacgagatgttaggac

SEQ ID NO: 2914 - DNA, 32 bp, Artificial sequence
  Artificial aptamer to IgGh
tcggcgcacgcagatagttggattggaggggg

SEQ ID NO: 2915 - DNA, 32 bp, Artificial sequence
  Artificial aptamer to IgGm
tcggcgggggtggcggttagagctctcactca

SEQ ID NO: 2916 - DNA, 32 bp, Artificial sequence
  Artificial aptamer to IgGm
tcggcgttgaacattgaggggtaggagggggg

SEQ ID NO: 2917 - DNA, 32 bp, Artificial sequence
  Artificial aptamer to IgGm
tcgggaaagggttaggggcggacgggttcctt

SEQ ID NO: 2918 - DNA, 32 bp, Artificial sequence
  Artificial aptamer to IgGm
tcgggatgttaatgtgcgggaagacccgtgca

SEQ ID NO: 2919 - DNA, 32 bp, Artificial sequence
  Artificial aptamer to IgGm
tcgggcaggctgggggtaagaggacaacataa

SEQ ID NO: 2920 - DNA, 32 bp, Artificial sequence
  Artificial aptamer to IgGh
tcgggcgggacggtggcgctctcaccttgaag

SEQ ID NO: 2921 - DNA, 32 bp, Artificial sequence
  Artificial aptamer to IgGh
tcgggctgaaccgcgacaacatacttttgtcg

SEQ ID NO: 2922 - DNA, 32 bp, Artificial sequence
  Artificial aptamer to IgGm
tcggggaaaccggcagtgttcgaactgcgagc

SEQ ID NO: 2923 - DNA, 32 bp, Artificial sequence
  Artificial aptamer to IgGh
tcggggagggagggggatatagaggagatgcg

SEQ ID NO: 2924 - DNA, 32 bp, Artificial sequence
  Artificial aptamer to IgGm
tcggggagtacgagatctcgggggattggggg

SEQ ID NO: 2925 - DNA, 32 bp, Artificial sequence
  Artificial aptamer to IgGm
tcgggggtgggttagggaggacaagggatgtg

SEQ ID NO: 2926 - DNA, 32 bp, Artificial sequence
  Artificial aptamer to IgGh
tcggtgggggagggacgctgtggaaaatccct

SEQ ID NO: 2927 - DNA, 32 bp, Artificial sequence
  Artificial aptamer to IgGm
tcgtacggggggagggtggtacccgggcgggg

SEQ ID NO: 2928 - DNA, 32 bp, Artificial sequence
  Artificial aptamer to IgGh
tcgtagtgggagggggggaggttaactcaatt

SEQ ID NO: 2929 - DNA, 32 bp, Artificial sequence
  Artificial aptamer to IgGm
tctccggaagagcacagggggctttacagccc

SEQ ID NO: 2930 - DNA, 32 bp, Artificial sequence
  Artificial aptamer to IgGm
tctccggcctcggatgggggaaataacgtccc

SEQ ID NO: 2931 - DNA, 32 bp, Artificial sequence
  Artificial aptamer to IgGm
tctcggaggcggtcggactaaggtagttacaa

SEQ ID NO: 2932 - DNA, 32 bp, Artificial sequence
  Artificial aptamer to IgGm
tctcgggatggaaggcggtcgcatgaggatta

SEQ ID NO: 2933 - DNA, 32 bp, Artificial sequence
  Artificial aptamer to IgGh
tctgacagggcagcgaggtacgagacctcggc

SEQ ID NO: 2934 - DNA, 32 bp, Artificial sequence
  Artificial aptamer to IgGm
tctgctagggtggaggatggtattgagtgaag

SEQ ID NO: 2935 - DNA, 32 bp, Artificial sequence
  Artificial aptamer to IgGm
tctggcaataggtaaattgccacttcttgtaa

SEQ ID NO: 2936 - DNA, 32 bp, Artificial sequence
  Artificial aptamer to IgGh
tctgggtgggtggggctccgtctgttgggctt

SEQ ID NO: 2937 - DNA, 32 bp, Artificial sequence
  Artificial aptamer to IgGh
tctgtactctaggtggagggccgggaattaag

SEQ ID NO: 2938 - DNA, 32 bp, Artificial sequence
  Artificial aptamer to IgGh
tctgttcgggggtaggtggtttttctttcttg

SEQ ID NO: 2939 - DNA, 32 bp, Artificial sequence
  Artificial aptamer to IgGh
tctgttgaggattggggtggcggaggggatcg

SEQ ID NO: 2940 - DNA, 32 bp, Artificial sequence
  Artificial aptamer to IgGm
tcttagccaacgcgtccgtcctggatatcgcg

SEQ ID NO: 2941 - DNA, 32 bp, Artificial sequence
  Artificial aptamer to IgGm
tcttttggcggtggcggctaggcaagtttagt

SEQ ID NO: 2942 - DNA, 32 bp, Artificial sequence
  Artificial aptamer to IgGh
tgaaatggaggcggtaggggatgtaaatcgtc

SEQ ID NO: 2943 - DNA, 32 bp, Artificial sequence
  Artificial aptamer to IgGh
tgaaggggaacgggggataagggcgggaaaag

SEQ ID NO: 2944 - DNA, 32 bp, Artificial sequence
  Artificial aptamer to IgGm
tgaatcgaccgaatgcgtattcggtgcgggat

SEQ ID NO: 2945 - DNA, 32 bp, Artificial sequence
  Artificial aptamer to IgGh
tgacagggaggaggatggcaagctatactatc

SEQ ID NO: 2946 - DNA, 32 bp, Artificial sequence
  Artificial aptamer to IgGh
tgacaggtggggacattcggacggtggaggta

SEQ ID NO: 2947 - DNA, 32 bp, Artificial sequence
  Artificial aptamer to IgGh
tgacggccgttcataggtgtggaggcggaatc

SEQ ID NO: 2948 - DNA, 32 bp, Artificial sequence
  Artificial aptamer to IgGm
tgacgggaacgaattgtgccagcaaggcgcac

SEQ ID NO: 2949 - DNA, 32 bp, Artificial sequence
  Artificial aptamer to IgGh
tgacgtcgggcttgaggtcggtaggcggggta

SEQ ID NO: 2950 - DNA, 32 bp, Artificial sequence
  Artificial aptamer to IgGm
tgactaactagtcatcttgttggttgcaagtg

SEQ ID NO: 2951 - DNA, 32 bp, Artificial sequence
  Artificial aptamer to IgGm
tgactcgatggctcagatggggggcgggggta

SEQ ID NO: 2952 - DNA, 32 bp, Artificial sequence
  Artificial aptamer to IgGm
tgagaatcttggtgggcggacgggagcgtaag

SEQ ID NO: 2953 - DNA, 32 bp, Artificial sequence
  Artificial aptamer to IgGh
tgagagatggcgcagccgcggtctcgcgcggt

SEQ ID NO: 2954 - DNA, 32 bp, Artificial sequence
  Artificial aptamer to IgGh
tgatagggagggccagggtagcgctcacgggg

SEQ ID NO: 2955 - DNA, 32 bp, Artificial sequence
  Artificial aptamer to IgGh
tgatgttacatcgggggagggcgggggcagtg

SEQ ID NO: 2956 - DNA, 32 bp, Artificial sequence
  Artificial aptamer to IgGh
tgattaaataacgggaaggaggcggtcgagga

SEQ ID NO: 2957 - DNA, 32 bp, Artificial sequence
  Artificial aptamer to IgGh
tgcaaatcggtgggggaggaaaattagcatcg

SEQ ID NO: 2958 - DNA, 32 bp, Artificial sequence
  Artificial aptamer to IgGm
tgcaacgcggcaggagttgccgtgctcggtca

SEQ ID NO: 2959 - DNA, 32 bp, Artificial sequence
  Artificial aptamer to IgGh
tgcacgagctcattcgtgccaatgagccattc

SEQ ID NO: 2960 - DNA, 32 bp, Artificial sequence
  Artificial aptamer to IgGm
tgcacggcgaaagcgctggctgcgctacaaat

SEQ ID NO: 2961 - DNA, 32 bp, Artificial sequence
  Artificial aptamer to IgGm
tgcacggtgaaaggcgggtggtaggggcatgt

SEQ ID NO: 2962 - DNA, 32 bp, Artificial sequence
  Artificial aptamer to IgGh
tgcagctgggttagggttgggtatagttcggg

SEQ ID NO: 2963 - DNA, 32 bp, Artificial sequence
  Artificial aptamer to IgGh
tgcaggctacccgttggttcacaacggctgtt

SEQ ID NO: 2964 - DNA, 32 bp, Artificial sequence
  Artificial aptamer to IgGm
tgcaggcttcgggttaccccgaatatttatgc

SEQ ID NO: 2965 - DNA, 32 bp, Artificial sequence
  Artificial aptamer to IgGm
tgcagtgcttggtgacggggtgggaggaagga

SEQ ID NO: 2966 - DNA, 32 bp, Artificial sequence
  Artificial aptamer to IgGm
tgccactgataataatctctcggcggaggtgg

SEQ ID NO: 2967 - DNA, 32 bp, Artificial sequence
  Artificial aptamer to IgGm
tgccaggcctcggcttcgttatgcctgggtgc

SEQ ID NO: 2968 - DNA, 32 bp, Artificial sequence
  Artificial aptamer to IgGm
tgccattggaggagtggtggataacagcagta

SEQ ID NO: 2969 - DNA, 32 bp, Artificial sequence
  Artificial aptamer to IgGh
tgccgtcgataagatggcgcggtaggtcgcct

SEQ ID NO: 2970 - DNA, 32 bp, Artificial sequence
  Artificial aptamer to IgGm
tgccgttccgacaggaaaattccgtcacggtg

SEQ ID NO: 2971 - DNA, 32 bp, Artificial sequence
  Artificial aptamer to IgGm
tgcctgtgttccttaggtggaccggcgggcac

SEQ ID NO: 2972 - DNA, 32 bp, Artificial sequence
  Artificial aptamer to IgGh
tgcggaaaagttgggtaggaccggtggcggta

SEQ ID NO: 2973 - DNA, 32 bp, Artificial sequence
  Artificial aptamer to IgGh
tgcggtcgagagtcctcaccgcgttgggatgg

SEQ ID NO: 2974 - DNA, 32 bp, Artificial sequence
  Artificial aptamer to IgGm
tgcggtggtggtggagaatcgttatctttacg

SEQ ID NO: 2975 - DNA, 32 bp, Artificial sequence
  Artificial aptamer to IgGm
tgcgtgactagaggggagctggtggagggggg

SEQ ID NO: 2976 - DNA, 32 bp, Artificial sequence
  Artificial aptamer to IgGh
tgcgtgtgctatgttaagaggtggatggcggc

SEQ ID NO: 2977 - DNA, 32 bp, Artificial sequence
  Artificial aptamer to IgGm
tgctagagggagttattatgggtggatggagg

SEQ ID NO: 2978 - DNA, 32 bp, Artificial sequence
  Artificial aptamer to IgGm
tgctattgggaacgacaggccggatggtggtt

SEQ ID NO: 2979 - DNA, 32 bp, Artificial sequence
  Artificial aptamer to IgGh
tgctcaagagaatttacagggggaggtgtggg

SEQ ID NO: 2980 - DNA, 32 bp, Artificial sequence
  Artificial aptamer to IgGm
tgctccggacggccagcgaccggtgatatgat

SEQ ID NO: 2981 - DNA, 32 bp, Artificial sequence
  Artificial aptamer to IgGh
tgctcggaggtggcggggttacacgaggtatc

SEQ ID NO: 2982 - DNA, 32 bp, Artificial sequence
  Artificial aptamer to IgGh
tgcttgtgttcatttcaggatggggggcggtg

SEQ ID NO: 2983 - DNA, 32 bp, Artificial sequence
  Artificial aptamer to IgGm
tggacaacagaaagaccaactcaaaagttggt

SEQ ID NO: 2984 - DNA, 32 bp, Artificial sequence
  Artificial aptamer to IgGm
tggacaagatcacttcccgcgtaagcgcgtgg

SEQ ID NO: 2985 - DNA, 32 bp, Artificial sequence
  Artificial aptamer to IgGh
tggacgggggcaggagtcatcggcacttgtac

SEQ ID NO: 2986 - DNA, 32 bp, Artificial sequence
  Artificial aptamer to IgGh
tggacgtcaagtttagatgggaggatggagga

SEQ ID NO: 2987 - DNA, 32 bp, Artificial sequence
  Artificial aptamer to IgGh
tggagggcggatggggatattatggaaggggc

SEQ ID NO: 2988 - DNA, 32 bp, Artificial sequence
  Artificial aptamer to IgGh
tggagggggcggtttcggtaaagctttgtgtc

SEQ ID NO: 2989 - DNA, 32 bp, Artificial sequence
  Artificial aptamer to IgGh
tggaggtggtggtttgaaacccggtacagtct

SEQ ID NO: 2990 - DNA, 32 bp, Artificial sequence
  Artificial aptamer to IgGh
tggatttgggagggaggacgggaacgactaaa

SEQ ID NO: 2991 - DNA, 32 bp, Artificial sequence
  Artificial aptamer to IgGm
tggcaaggaccaatggtgtcgttcaccatcct

SEQ ID NO: 2992 - DNA, 32 bp, Artificial sequence
  Artificial aptamer to IgGm
tggcaatggggtaagggggagggttcaagtat

SEQ ID NO: 2993 - DNA, 32 bp, Artificial sequence
  Artificial aptamer to IgGm
tggcatagcatgctccggacggctggacgggg

SEQ ID NO: 2994 - DNA, 32 bp, Artificial sequence
  Artificial aptamer to IgGm
tggcgaggcgtaagattgtcgtttcgccggtt

SEQ ID NO: 2995 - DNA, 32 bp, Artificial sequence
  Artificial aptamer to IgGh
tggcgagtcatcctcgaaccgcaccaagcgat

SEQ ID NO: 2996 - DNA, 32 bp, Artificial sequence
  Artificial aptamer to IgGh
tggcgatccacgccgcgtgacaaacgttgttg

SEQ ID NO: 2997 - DNA, 32 bp, Artificial sequence
  Artificial aptamer to IgGh
tggcggaggaggacgtagtaggggccgtgggc

SEQ ID NO: 2998 - DNA, 32 bp, Artificial sequence
  Artificial aptamer to IgGm
tggcggccggaggaataatcgtgcccctgtaa

SEQ ID NO: 2999 - DNA, 32 bp, Artificial sequence
  Artificial aptamer to IgGm
tggcggctgggaggttggaaggatccgcgtga

SEQ ID NO: 3000 - DNA, 32 bp, Artificial sequence
  Artificial aptamer to IgGh
tggcgggcggtaggttgatctcttgttcgttt

SEQ ID NO: 3001 - DNA, 32 bp, Artificial sequence
  Artificial aptamer to IgGh
tggcggtatgggggctccttgcactcccgcga

SEQ ID NO: 3002 - DNA, 32 bp, Artificial sequence
  Artificial aptamer to IgGm
tggcggtgggggtcgggcctgtaatgagaatt

SEQ ID NO: 3003 - DNA, 32 bp, Artificial sequence
  Artificial aptamer to IgGh
tggcggtggtggttgtgtagcttcggggtttc

SEQ ID NO: 3004 - DNA, 32 bp, Artificial sequence
  Artificial aptamer to IgGh
tggctggaggtcggtgtaacacggtcgtcatt

SEQ ID NO: 3005 - DNA, 32 bp, Artificial sequence
  Artificial aptamer to IgGh
tgggacgcgactgtcggtgcacgaaacgcgta

SEQ ID NO: 3006 - DNA, 32 bp, Artificial sequence
  Artificial aptamer to IgGh
tgggagatcggttggtggacggctcaagggag

SEQ ID NO: 3007 - DNA, 32 bp, Artificial sequence
  Artificial aptamer to IgGm
tgggaggtggtacgggctcaaacactcaagtt

SEQ ID NO: 3008 - DNA, 32 bp, Artificial sequence
  Artificial aptamer to IgGm
tgggcctctaactcgcgcggcggaacggaggg

SEQ ID NO: 3009 - DNA, 32 bp, Artificial sequence
  Artificial aptamer to IgGm
tggggaagggagggttgtgcatgaagggctac

SEQ ID NO: 3010 - DNA, 32 bp, Artificial sequence
  Artificial aptamer to IgGh
tggggagggtggtgggatacgtataaaactca

SEQ ID NO: 3011 - DNA, 32 bp, Artificial sequence
  Artificial aptamer to IgGh
tgggggatggttggattcattaaagcctcgta

SEQ ID NO: 3012 - DNA, 32 bp, Artificial sequence
  Artificial aptamer to IgGm
tggggggcgggggatacaccattccgagtgaa

SEQ ID NO: 3013 - DNA, 32 bp, Artificial sequence
  Artificial aptamer to IgGm
tgggggtggggcggaaagaccgggcaaatagt

SEQ ID NO: 3014 - DNA, 32 bp, Artificial sequence
  Artificial aptamer to IgGh
tgggggtggttggacaaatcgttaattaatgt

SEQ ID NO: 3015 - DNA, 32 bp, Artificial sequence
  Artificial aptamer to IgGm
tggggtttcgctggtggcggtggaaagaaata

SEQ ID NO: 3016 - DNA, 32 bp, Artificial sequence
  Artificial aptamer to IgGm
tgggtaacagcagcgcggtgggggcgggtagc

SEQ ID NO: 3017 - DNA, 32 bp, Artificial sequence
  Artificial aptamer to IgGm
tgggtgatagctcgccccggattggacaatcc

SEQ ID NO: 3018 - DNA, 32 bp, Artificial sequence
  Artificial aptamer to IgGh
tgggtggtggtaaggtgaggccaactgtttgc

SEQ ID NO: 3019 - DNA, 32 bp, Artificial sequence
  Artificial aptamer to IgGh
tgggttaggagtatggctcggtggtggaataa

SEQ ID NO: 3020 - DNA, 32 bp, Artificial sequence
  Artificial aptamer to IgGh
tggtacaatgggcttatggcggaaaggtggtc

SEQ ID NO: 3021 - DNA, 32 bp, Artificial sequence
  Artificial aptamer to IgGm
tggtctgggaaaaggttggtcggagggttaaa

SEQ ID NO: 3022 - DNA, 32 bp, Artificial sequence
  Artificial aptamer to IgGm
tggtggaggaaggttcccgttttcaagggtgc

SEQ ID NO: 3023 - DNA, 32 bp, Artificial sequence
  Artificial aptamer to IgGm
tggtgggggcaggttatactaactcgctgaag

SEQ ID NO: 3024 - DNA, 32 bp, Artificial sequence
  Artificial aptamer to IgGm
tggtgggggctaaggggcttattgaaagcgta

SEQ ID NO: 3025 - DNA, 32 bp, Artificial sequence
  Artificial aptamer to IgGh
tgtaccagtgtaacttaaggaggcggggggga

SEQ ID NO: 3026 - DNA, 32 bp, Artificial sequence
  Artificial aptamer to IgGm
tgtacgttactgaggtgggctggcggtctgac

SEQ ID NO: 3027 - DNA, 32 bp, Artificial sequence
  Artificial aptamer to IgGm
tgtatccacaacgcgttggtttaacgcaggag

SEQ ID NO: 3028 - DNA, 32 bp, Artificial sequence
  Artificial aptamer to IgGm
tgtcctaggaaaacgaaattggtggttggggg

SEQ ID NO: 3029 - DNA, 32 bp, Artificial sequence
  Artificial aptamer to IgGm
tgtcgtgcgcgatctttcggaggagggggatt

SEQ ID NO: 3030 - DNA, 32 bp, Artificial sequence
  Artificial aptamer to IgGh
tgtgcactgtgtaggttgggggtggacggact

SEQ ID NO: 3031 - DNA, 32 bp, Artificial sequence
  Artificial aptamer to IgGm
tgtgggggagggaggtcggagggctgaataag

SEQ ID NO: 3032 - DNA, 32 bp, Artificial sequence
  Artificial aptamer to IgGm
tgttgaacgattttcgttctttcgatgtcgat

SEQ ID NO: 3033 - DNA, 32 bp, Artificial sequence
  Artificial aptamer to IgGm
tgttgggaatggggccaggggctagggggaag

SEQ ID NO: 3034 - DNA, 32 bp, Artificial sequence
  Artificial aptamer to IgGm
ttaaccgttccggtagccttccggggttatga

SEQ ID NO: 3035 - DNA, 32 bp, Artificial sequence
  Artificial aptamer to IgGm
ttacacaggcggagggggcattgtattttttc

SEQ ID NO: 3036 - DNA, 32 bp, Artificial sequence
  Artificial aptamer to IgGm
ttagacgatgatatagggtggtctggggggag

SEQ ID NO: 3037 - DNA, 32 bp, Artificial sequence
  Artificial aptamer to IgGh
ttatcgggaggtggactggccaatgtaaggca

SEQ ID NO: 3038 - DNA, 32 bp, Artificial sequence
  Artificial aptamer to IgGh
ttattgtaccctgttgcggttggcgggggggt

SEQ ID NO: 3039 - DNA, 32 bp, Artificial sequence
  Artificial aptamer to IgGh
ttcagaggtataggtggcggaggactgggttc

SEQ ID NO: 3040 - DNA, 32 bp, Artificial sequence
  Artificial aptamer to IgGh
ttcgcaagaatagatcatggtggcttggggga

SEQ ID NO: 3041 - DNA, 32 bp, Artificial sequence
  Artificial aptamer to IgGh
ttcggcggcagggggaatttctaactttcgga

SEQ ID NO: 3042 - DNA, 32 bp, Artificial sequence
  Artificial aptamer to IgGm
ttcgggctggacggcggcaaaacacgtggaca

SEQ ID NO: 3043 - DNA, 32 bp, Artificial sequence
  Artificial aptamer to IgGh
ttcggggcacggtggacgatcaccggatcgtc

SEQ ID NO: 3044 - DNA, 32 bp, Artificial sequence
  Artificial aptamer to IgGm
ttctgacaccggaatccgcacccagaatgcgg

SEQ ID NO: 3045 - DNA, 32 bp, Artificial sequence
  Artificial aptamer to IgGh
ttgactccggggggtggttaggagaccgcttc

SEQ ID NO: 3046 - DNA, 32 bp, Artificial sequence
  Artificial aptamer to IgGh
ttgcagtttgactttagcgggggagggtggga

SEQ ID NO: 3047 - DNA, 32 bp, Artificial sequence
  Artificial aptamer to IgGh
ttgccggatcggtggtggcaaacagcagagtg

SEQ ID NO: 3048 - DNA, 32 bp, Artificial sequence
  Artificial aptamer to IgGm
ttgcctcgaagttgggttaccgacccacgagc

SEQ ID NO: 3049 - DNA, 32 bp, Artificial sequence
  Artificial aptamer to IgGm
ttgctttggacgaatcggggcggtggctggga

SEQ ID NO: 3050 - DNA, 32 bp, Artificial sequence
  Artificial aptamer to IgGm
ttggcgggagggtgggtacttatctggtgtcg

SEQ ID NO: 3051 - DNA, 32 bp, Artificial sequence
  Artificial aptamer to IgGh
ttggggggacggcgggatacttgtcggatcat

SEQ ID NO: 3052 - DNA, 32 bp, Artificial sequence
  Artificial aptamer to IgGm
ttggtggcctggagggtggcagacagagttaa

SEQ ID NO: 3053 - DNA, 32 bp, Artificial sequence
  Artificial aptamer to IgGh
tttagggtagggggcaggcggtctcctggttc

SEQ ID NO: 3054 - DNA, 32 bp, Artificial sequence
  Artificial aptamer to IgGm
tttcgggagcggtcataggaggtctgggggga

SEQ ID NO: 3055 - DNA, 32 bp, Artificial sequence
  Artificial aptamer to IgGh
tttgaggcggaggtggtcaccagagaagtgtt

SEQ ID NO: 3056 - DNA, 32 bp, Artificial sequence
  Artificial aptamer to IgGh
tttgatgggggaaggagggtcgttagaggtgg

SEQ ID NO: 3057 - DNA, 32 bp, Artificial sequence
  Artificial aptamer to IgGh
tttgctgggaggggcaacgatccccgagatcg

SEQ ID NO: 3058 - DNA, 32 bp, Artificial sequence
  Artificial aptamer to IgGm
tttggttggagggtcggttttagctgaaaaac

SEQ ID NO: 3059 - DNA, 70 bp, Artificial sequence
  Artificial aptamer to BontB
taatacgactcactatagggcggcgggcgggcttggatttcaccgccaccgcaggtcaattcgcattgtc

SEQ ID NO: 3060 - DNA, 32 bp, Artificial sequence
  Artificial aptamer to BontB
gcggcgggcgggcttggatttcaccgccaccg

SEQ ID NO: 3061 - DNA, 32 bp, Artificial sequence
  Artificial aptamer to IFNg
ccgcggactatatgatatgcacttacccgcga

SEQ ID NO: 3062 - DNA, 32 bp, Artificial sequence
  Artificial aptamer to IFNg
agcttggaatcaccgcgtccctcgaacgcgaa

SEQ ID NO: 3063 - DNA, 32 bp, Artificial sequence
  Artificial aptamer to IFNg
catgaacggtcggaaacgatcgtgcaacggaa

SEQ ID NO: 3064 - DNA, 32 bp, Artificial sequence
  Artificial aptamer to IFNg
cacgctccgtataacttggtccgactgcggac

SEQ ID NO: 3065 - DNA, 32 bp, Artificial sequence
  Artificial aptamer to IFNg
tcacacggtgcgtgtgtatgcgcttactgtcg

SEQ ID NO: 3066 - DNA, 32 bp, Artificial sequence
  Artificial aptamer to IFNg
ccgcggtcgctcggagagcgctctgcttgaac

SEQ ID NO: 3067 - DNA, 32 bp, Artificial sequence
  Artificial aptamer to IFNg
cacgcgttggaaggttgcgtgaagttacgaaa

SEQ ID NO: 3068 - DNA, 32 bp, Artificial sequence
  Artificial aptamer to IFNg
cctgttagccgcgacggtaacagcaacgactc

SEQ ID NO: 3069 - DNA, 32 bp, Artificial sequence
  Artificial aptamer to IFNg
acgcgcgtaacaatctgcacgaaccattcgtg

SEQ ID NO: 3070 - DNA, 32 bp, Artificial sequence
  Artificial aptamer to IFNg
gtcgcacggttcagcgattgctctgtgtagag

SEQ ID NO: 3071 - DNA, 32 bp, Artificial sequence
  Artificial aptamer to IFNg
cacttataccgctaaatgggcatcaagcccac

SEQ ID NO: 3072 - DNA, 32 bp, Artificial sequence
  Artificial aptamer to IFNg
acgtcaaagctgtctaacgacctacgttaagc

SEQ ID NO: 3073 - DNA, 32 bp, Artificial sequence
  Artificial aptamer to IFNg
gttgcgccattcttggtcgcgtcattcaagcg

SEQ ID NO: 3074 - DNA, 32 bp, Artificial sequence
  Artificial aptamer to IFNg
gacatgaaaacatgtcacatttccctccattt

SEQ ID NO: 3075 - DNA, 32 bp, Artificial sequence
  Artificial aptamer to IFNg
tatatgtacaagactcgtgacgggtacgagta

SEQ ID NO: 3076 - DNA, 32 bp, Artificial sequence
  Artificial aptamer to IFNg
cctgggacacactatccccagggaattcagtc

SEQ ID NO: 3077 - DNA, 32 bp, Artificial sequence
  Artificial aptamer to IFNg
acagacacacccgaggcccgtcttatgggcca

SEQ ID NO: 3078 - DNA, 32 bp, Artificial sequence
  Artificial aptamer to IFNg
gacgacaaacaaggtaggcccccggcctagga

SEQ ID NO: 3079 - DNA, 32 bp, Artificial sequence
  Artificial aptamer to IFNg
cccggatgggttcaatggaccttatgtccgac

SEQ ID NO: 3080 - DNA, 32 bp, Artificial sequence
  Artificial aptamer to IFNg
cttggcgagaccactggcattgtggtcatagg

SEQ ID NO: 3081 - DNA, 32 bp, Artificial sequence
  Artificial aptamer to IFNg
gactagactaggatacggtctccaaccggatc

SEQ ID NO: 3082 - DNA, 32 bp, Artificial sequence
  Artificial aptamer to IFNg
acaggagggggtaccctctaaggttaattact

SEQ ID NO: 3083 - DNA, 32 bp, Artificial sequence
  Artificial aptamer to IFNg
aacacggctggaaagtccgtggaaccaacacc

SEQ ID NO: 3084 - DNA, 32 bp, Artificial sequence
  Artificial aptamer to IFNg
tccttgctagtactcctcgttaggagttagtt

SEQ ID NO: 3085 - DNA, 32 bp, Artificial sequence
  Artificial aptamer to IFNg
cccctcggcaacacgcaccgtgtactgcaaga

SEQ ID NO: 3086 - DNA, 32 bp, Artificial sequence
  Artificial aptamer to IFNg
ccgggtgcaccgtggcgcctccctgatcggca

SEQ ID NO: 3087 - DNA, 32 bp, Artificial sequence
  Artificial aptamer to IFNg
ccttatggaacctacccggaagcggaggtatt

SEQ ID NO: 3088 - DNA, 32 bp, Artificial sequence
  Artificial aptamer to IFNg
cccccgtgaatcattaacacgtccgcgaacgg

SEQ ID NO: 3089 - DNA, 32 bp, Artificial sequence
  Artificial aptamer to IFNg
cgtatcatagcgtagttcgaaatttcgaacaa

SEQ ID NO: 3090 - DNA, 32 bp, Artificial sequence
  Artificial aptamer to IFNg
cgcacaccttacgtggtccgacgtgcgaaacg

SEQ ID NO: 3091 - DNA, 32 bp, Artificial sequence
  Artificial aptamer to IFNg
gtccggaagtcgtgggaagacttcaaggtgga

SEQ ID NO: 3092 - DNA, 32 bp, Artificial sequence
  Artificial aptamer to IFNg
ccactggaagagtggacatccgcgacttgtcg

SEQ ID NO: 3093 - DNA, 32 bp, Artificial sequence
  Artificial aptamer to IFNg
tctaggtgggagccactgcgaaaagatcgcta

SEQ ID NO: 3094 - DNA, 32 bp, Artificial sequence
  Artificial aptamer to IFNg
cttagataggacagtcggcgaaacggtcgcct

SEQ ID NO: 3095 - DNA, 32 bp, Artificial sequence
  Artificial aptamer to IFNg
acgggggcacaatgcacaaagatgggcaagtg

SEQ ID NO: 3096 - DNA, 32 bp, Artificial sequence
  Artificial aptamer to IFNg
cggcgtttccaatgtcataaacgcaatcatcg

SEQ ID NO: 3097 - DNA, 32 bp, Artificial sequence
  Artificial aptamer to IFNg
gttacagcggctagtggatcataatccccgca

SEQ ID NO: 3098 - DNA, 32 bp, Artificial sequence
  Artificial aptamer to IFNg
cgggcctagtcattttttgagatccgggccgg

SEQ ID NO: 3099 - DNA, 32 bp, Artificial sequence
  Artificial aptamer to IFNg
ctcttgtgctttgtgcacaatatcatattacc

SEQ ID NO: 3100 - DNA, 32 bp, Artificial sequence
  Artificial aptamer to IFNg
ccggtacgcatcaataaaccacttatttgcgg

SEQ ID NO: 3101 - DNA, 32 bp, Artificial sequence
  Artificial aptamer to IFNg
cgcttacgttcaacgagatacgtcgttgcatc

SEQ ID NO: 3102 - DNA, 32 bp, Artificial sequence
  Artificial aptamer to IFNg
tgggggcgggagagcaacccgtagcgacgggc

SEQ ID NO: 3103 - DNA, 32 bp, Artificial sequence
  Artificial aptamer to IFNg
tagcagcgggggtgtgcacgtctggtgcaaca

SEQ ID NO: 3104 - DNA, 32 bp, Artificial sequence
  Artificial aptamer to IFNg
ccagatcccgggggcgtcaaatactgatgcct

SEQ ID NO: 3105 - DNA, 32 bp, Artificial sequence
  Artificial aptamer to IFNg
gtgcgaagaacaaatcaaaatgttcccgctgg

SEQ ID NO: 3106 - DNA, 32 bp, Artificial sequence
  Artificial aptamer to IFNg
gtcccacaacacgcaacctagaggcgtgccca

SEQ ID NO: 3107 - DNA, 32 bp, Artificial sequence
  Artificial aptamer to IFNg
ccacagcagcgttcttacgctaacagcaccta

SEQ ID NO: 3108 - DNA, 32 bp, Artificial sequence
  Artificial aptamer to IFNg
tcaaaattcgacgccatgcgtcagtagagtgt

SEQ ID NO: 3109 - DNA, 32 bp, Artificial sequence
  Artificial aptamer to IFNg
aactttttcagcaacggggggatcctgttgaa

SEQ ID NO: 3110 - DNA, 32 bp, Artificial sequence
  Artificial aptamer to IFNg
cctaacatacccaacgatgggaaccttaggta

SEQ ID NO: 3111 - DNA, 32 bp, Artificial sequence
  Artificial aptamer to IFNg
cctcgggggagcgaaatcctacgctcgataaa

SEQ ID NO: 3112 - DNA, 32 bp, Artificial sequence
  Artificial aptamer to IFNg
ccaccaggtgggtgacaaatccgagggacggt

SEQ ID NO: 3113 - DNA, 32 bp, Artificial sequence
  Artificial aptamer to IFNg
ccgaggaatgcagaaggcacagttgccttatt

SEQ ID NO: 3114 - DNA, 32 bp, Artificial sequence
  Artificial aptamer to IFNg
ccgggccacataatttggcacgaattccaatc

SEQ ID NO: 3115 - DNA, 32 bp, Artificial sequence
  Artificial aptamer to IFNg
cgtggctcaaaccattccgatccatatcggta

SEQ ID NO: 3116 - DNA, 32 bp, Artificial sequence
  Artificial aptamer to IFNg
ccgcagtaagcggtacaaatgctatggcatta

SEQ ID NO: 3117 - DNA, 32 bp, Artificial sequence
  Artificial aptamer to IFNg
cgtgcgtatgtcgtacggaaatacttcaggat

SEQ ID NO: 3118 - DNA, 32 bp, Artificial sequence
  Artificial aptamer to IFNg
gttccaatattcgcaacctagaatagggtgca

SEQ ID NO: 3119 - DNA, 32 bp, Artificial sequence
  Artificial aptamer to IFNg
cctgggaagggtaccaactcccttcagaattt

SEQ ID NO: 3120 - DNA, 32 bp, Artificial sequence
  Artificial aptamer to IFNg
gtcccgattgcggaacaaaccgttgttatctc

SEQ ID NO: 3121 - DNA, 32 bp, Artificial sequence
  Artificial aptamer to IFNg
ccatgcgactccttcgtatggaattccagacg

SEQ ID NO: 3122 - DNA, 32 bp, Artificial sequence
  Artificial aptamer to IFNg
gcacagaacgtccggtttgatcttcaaagtgg

SEQ ID NO: 3123 - DNA, 32 bp, Artificial sequence
  Artificial aptamer to IFNg
ccggtttagaacgtcaatatatgttgacgaat

SEQ ID NO: 3124 - DNA, 32 bp, Artificial sequence
  Artificial aptamer to IFNg
gtacaacaccgctgatgtacagggtgcctatc

SEQ ID NO: 3125 - DNA, 32 bp, Artificial sequence
  Artificial aptamer to IFNg
tccctgaacgctgtgacagcgcattctcaagg

SEQ ID NO: 3126 - DNA, 32 bp, Artificial sequence
  Artificial aptamer to IFNg
ccacgctataaaacgcaagctgataagcggcg

SEQ ID NO: 3127 - DNA, 32 bp, Artificial sequence
  Artificial aptamer to IFNg
gagcgtgcgatctttgtaccagttgcacgttt

SEQ ID NO: 3128 - DNA, 32 bp, Artificial sequence
  Artificial aptamer to IFNg
ctcaataagggtggaccgagaacggtctaaga

SEQ ID NO: 3129 - DNA, 32 bp, Artificial sequence
  Artificial aptamer to IFNg
cccaccatgtccgtgggaaacgaccagactgg

SEQ ID NO: 3130 - DNA, 32 bp, Artificial sequence
  Artificial aptamer to IFNg
gtgggtggtgtcggatagcaccactgatggta

SEQ ID NO: 3131 - DNA, 32 bp, Artificial sequence
  Artificial aptamer to IFNg
ctacgtacatgaattttgatactaacagcgca

SEQ ID NO: 3132 - DNA, 32 bp, Artificial sequence
  Artificial aptamer to IFNg
gtgcgtggtcatccaggcttgtggacatacaa

SEQ ID NO: 3133 - DNA, 32 bp, Artificial sequence
  Artificial aptamer to IFNg
gacctgaagtatgacaatgaccgaagcggtca

SEQ ID NO: 3134 - DNA, 32 bp, Artificial sequence
  Artificial aptamer to IFNg
caagtccaaccgcctgcatatcaggctcacca

SEQ ID NO: 3135 - DNA, 32 bp, Artificial sequence
  Artificial aptamer to IFNg
ccccaagcgatcaagcggcttggttctttctc

SEQ ID NO: 3136 - DNA, 32 bp, Artificial sequence
  Artificial aptamer to IFNg
ctgaccggttagagactcaaaccggcattggc

SEQ ID NO: 3137 - DNA, 32 bp, Artificial sequence
  Artificial aptamer to IFNg
cgcctacttaatagggccggagcttaacggcg

SEQ ID NO: 3138 - DNA, 32 bp, Artificial sequence
  Artificial aptamer to IFNg
ctcggtagagttgcgcggagcttcggcggaat

SEQ ID NO: 3139 - DNA, 32 bp, Artificial sequence
  Artificial aptamer to IFNg
cacggcggggaacaaaggtcgtgtcagcccgc

SEQ ID NO: 3140 - DNA, 32 bp, Artificial sequence
  Artificial aptamer to IFNg
gtcacggtactggcgtaacgccggtggacatg

SEQ ID NO: 3141 - DNA, 32 bp, Artificial sequence
  Artificial aptamer to IFNg
gacttcaaccgtagggtttgaagagggagcga

SEQ ID NO: 3142 - DNA, 32 bp, Artificial sequence
  Artificial aptamer to IFNg
caccgttaccgagacgggtacagtctcgctcg

SEQ ID NO: 3143 - DNA, 32 bp, Artificial sequence
  Artificial aptamer to IFNg
gaaccgcgtaacagctacgaacggtatctgcg

SEQ ID NO: 3144 - DNA, 32 bp, Artificial sequence
  Artificial aptamer to IFNg
ccaacaggcttgttggggaggggcctgcgatg

SEQ ID NO: 3145 - DNA, 32 bp, Artificial sequence
  Artificial aptamer to IFNg
cggtgttggacgttccagcaagggcgcacctc

SEQ ID NO: 3146 - DNA, 32 bp, Artificial sequence
  Artificial aptamer to IFNg
accatcgggccaggaaagacgccaacccgtgg

SEQ ID NO: 3147 - DNA, 32 bp, Artificial sequence
  Artificial aptamer to IFNg
tgcgtgtctatcggtagtaccgactcgcgttc

SEQ ID NO: 3148 - DNA, 32 bp, Artificial sequence
  Artificial aptamer to IFNg
gcacatgagtgcttgaccgataaggtcgaaaa

SEQ ID NO: 3149 - DNA, 32 bp, Artificial sequence
  Artificial aptamer to IFNg
tgtggaagcgggcttagtcatcatcccgcatt

SEQ ID NO: 3150 - DNA, 32 bp, Artificial sequence
  Artificial aptamer to IFNg
cccggacgggtggcgttactctacgtccgtta

SEQ ID NO: 3151 - DNA, 32 bp, Artificial sequence
  Artificial aptamer to IFNg
tgcgggattgcgagaacgcaaattcatttgca

SEQ ID NO: 3152 - DNA, 32 bp, Artificial sequence
  Artificial aptamer to IFNg
ccacgggacaatcggacgaaaatgtcccgaca

SEQ ID NO: 3153 - DNA, 32 bp, Artificial sequence
  Artificial aptamer to IFNg
ttgcccaacgtggtgtttatcaccttggattc

SEQ ID NO: 3154 - DNA, 32 bp, Artificial sequence
  Artificial aptamer to CMVgB
acacgagcccaactccggtatgggcacagaca

SEQ ID NO: 3155 - DNA, 32 bp, Artificial sequence
  Artificial aptamer to CMVgB
accccctcgccggtcttccggacgttaacaca

SEQ ID NO: 3156 - DNA, 32 bp, Artificial sequence
  Artificial aptamer to CMVgB
acgcccatgcagccatactgtcaggtacaacc

SEQ ID NO: 3157 - DNA, 32 bp, Artificial sequence
  Artificial aptamer to CMVgB
actaacgagacgcacctcgagcgtctacacat

SEQ ID NO: 3158 - DNA, 32 bp, Artificial sequence
  Artificial aptamer to CMVgB
aggcggcacttagactcgaccgcccttaacgg

SEQ ID NO: 3159 - DNA, 32 bp, Artificial sequence
  Artificial aptamer to CMVgB
cacagggctagatgacggcattcgtgcacgtc

SEQ ID NO: 3160 - DNA, 32 bp, Artificial sequence
  Artificial aptamer to CMVgB
caccgacccattacggtacggtggaagcagtt

SEQ ID NO: 3161 - DNA, 32 bp, Artificial sequence
  Artificial aptamer to CMVgB
cacgccacaatggggtgaatgaaaatcgttag

SEQ ID NO: 3162 - DNA, 32 bp, Artificial sequence
  Artificial aptamer to CMVgB
cacgtgactaataccgttagttacgctttgac

SEQ ID NO: 3163 - DNA, 32 bp, Artificial sequence
  Artificial aptamer to CMVgB
catgaagtacggttgcgtaccattcacggtgg

SEQ ID NO: 3164 - DNA, 32 bp, Artificial sequence
  Artificial aptamer to CMVgB
ccaaccacgtgtgaccccgaattaacaacttt

SEQ ID NO: 3165 - DNA, 32 bp, Artificial sequence
  Artificial aptamer to CMVgB
ccaccagtggattcaacactaacgaggtggac

SEQ ID NO: 3166 - DNA, 32 bp, Artificial sequence
  Artificial aptamer to CMVgB
ccactaatagagaagaccggttgggaccggac

SEQ ID NO: 3167 - DNA, 32 bp, Artificial sequence
  Artificial aptamer to CMVgB
ccagtcaggcggcgggggtggcgcccttcttt

SEQ ID NO: 3168 - DNA, 32 bp, Artificial sequence
  Artificial aptamer to CMVgB
ccataaccctcatcgacggctaaccgtcatac

SEQ ID NO: 3169 - DNA, 32 bp, Artificial sequence
  Artificial aptamer to CMVgB
ccatatacggtctgcccccagcagggggttag

SEQ ID NO: 3170 - DNA, 32 bp, Artificial sequence
  Artificial aptamer to CMVgB
cccactgtactgcaaagattgtttgcatggat

SEQ ID NO: 3171 - DNA, 32 bp, Artificial sequence
  Artificial aptamer to CMVgB
cccatccctacatcacgtacatgatgtagttt

SEQ ID NO: 3172 - DNA, 32 bp, Artificial sequence
  Artificial aptamer to CMVgB
cccatgcagcacccgattgcgcggttgggagc

SEQ ID NO: 3173 - DNA, 32 bp, Artificial sequence
  Artificial aptamer to CMVgB
cccccatctgacacgatagtgagatcaggtgg

SEQ ID NO: 3174 - DNA, 32 bp, Artificial sequence
  Artificial aptamer to CMVgB
ccccgcagttgacgcttctgcggttttgttac

SEQ ID NO: 3175 - DNA, 32 bp, Artificial sequence
  Artificial aptamer to CMVgB
cccctgctcagaggaggcgggtcgccggctgg

SEQ ID NO: 3176 - DNA, 32 bp, Artificial sequence
  Artificial aptamer to CMVgB
ccgagatcacgggggctttccctcatagcccc

SEQ ID NO: 3177 - DNA, 32 bp, Artificial sequence
  Artificial aptamer to CMVgB
ccgaggatctggatagctgaaattcaacgatc

SEQ ID NO: 3178 - DNA, 32 bp, Artificial sequence
  Artificial aptamer to CMVgB
ccgccacaaggaattggggcacaccttcgaag

SEQ ID NO: 3179 - DNA, 32 bp, Artificial sequence
  Artificial aptamer to CMVgB
ccggcggagccatttcgagctcggatccggat

SEQ ID NO: 3180 - DNA, 32 bp, Artificial sequence
  Artificial aptamer to CMVgB
ccgggcgaccgggttgttttcccctgagggga

SEQ ID NO: 3181 - DNA, 32 bp, Artificial sequence
  Artificial aptamer to CMVgB
cctactaactacacaactgagagttgtggaga

SEQ ID NO: 3182 - DNA, 32 bp, Artificial sequence
  Artificial aptamer to CMVgB
cctaggaaagggtttgatactaaacgcttacc

SEQ ID NO: 3183 - DNA, 32 bp, Artificial sequence
  Artificial aptamer to CMVgB
cctcaggatgctcgggatggacccgtgtagcg

SEQ ID NO: 3184 - DNA, 32 bp, Artificial sequence
  Artificial aptamer to CMVgB
cctcatcacagtctgaaccacacggtagactg

SEQ ID NO: 3185 - DNA, 32 bp, Artificial sequence
  Artificial aptamer to CMVgB
cctcatgtatcggtgcttacgaaagcaatcga

SEQ ID NO: 3186 - DNA, 32 bp, Artificial sequence
  Artificial aptamer to CMVgB
cctcgagaacgacctggtagcgcccgccggcg

SEQ ID NO: 3187 - DNA, 32 bp, Artificial sequence
  Artificial aptamer to CMVgB
cctctagctgtgctcagcttaatgacaccatt

SEQ ID NO: 3188 - DNA, 32 bp, Artificial sequence
  Artificial aptamer to CMVgB
cctgcatccgacagattacgtgtcggcaaatg

SEQ ID NO: 3189 - DNA, 32 bp, Artificial sequence
  Artificial aptamer to CMVgB
cctggaaagtgggccgaagctcagtttcaatc

SEQ ID NO: 3190 - DNA, 32 bp, Artificial sequence
  Artificial aptamer to CMVgB
cgacaacggcggacctaatcggcgttcgatcc

SEQ ID NO: 3191 - DNA, 32 bp, Artificial sequence
  Artificial aptamer to CMVgB
cgaccaggggtgctgtgtctggtcttatgacc

SEQ ID NO: 3192 - DNA, 32 bp, Artificial sequence
  Artificial aptamer to CMVgB
cgatttggtaatgcctttggcgttacgagcta

SEQ ID NO: 3193 - DNA, 32 bp, Artificial sequence
  Artificial aptamer to CMVgB
cggatgtgagcgctccagatccgagaagattc

SEQ ID NO: 3194 - DNA, 32 bp, Artificial sequence
  Artificial aptamer to CMVgB
cggggacggaaggacggtacgctcgtaccgcg

SEQ ID NO: 3195 - DNA, 32 bp, Artificial sequence
  Artificial aptamer to CMVgB
cggtgcacgcgtacagagtgcacatttatctc

SEQ ID NO: 3196 - DNA, 32 bp, Artificial sequence
  Artificial aptamer to CMVgB
cgtcacggaagtgggaagtgccacgtccgaat

SEQ ID NO: 3197 - DNA, 32 bp, Artificial sequence
  Artificial aptamer to CMVgB
cgtccgaaccgaagacaccgcgttcctgacga

SEQ ID NO: 3198 - DNA, 32 bp, Artificial sequence
  Artificial aptamer to CMVgB
cgtccgggtaccggaatattcgtaaaacgtct

SEQ ID NO: 3199 - DNA, 32 bp, Artificial sequence
  Artificial aptamer to CMVgB
cgtgaattacggtcatattagccaaactggct

SEQ ID NO: 3200 - DNA, 32 bp, Artificial sequence
  Artificial aptamer to CMVgB
ctaaacggcagtgtagactactcacacactgc

SEQ ID NO: 3201 - DNA, 32 bp, Artificial sequence
  Artificial aptamer to CMVgB
ctaattctacttaccccttggcaagggggcca

SEQ ID NO: 3202 - DNA, 32 bp, Artificial sequence
  Artificial aptamer to CMVgB
ctagattgcgagcgaggcgctatattctcgca

SEQ ID NO: 3203 - DNA, 32 bp, Artificial sequence
  Artificial aptamer to CMVgB
ctccgtcaacggcactgatggtgtaccagtgc

SEQ ID NO: 3204 - DNA, 32 bp, Artificial sequence
  Artificial aptamer to CMVgB
ctgcagtgtgacaccataatcccagcacactg

SEQ ID NO: 3205 - DNA, 32 bp, Artificial sequence
  Artificial aptamer to CMVgB
ctgctatttgaaggccaagtagcaacgcaaac

SEQ ID NO: 3206 - DNA, 32 bp, Artificial sequence
  Artificial aptamer to CMVgB
gaccgggccacaaacccggaggcttctcctgt

SEQ ID NO: 3207 - DNA, 32 bp, Artificial sequence
  Artificial aptamer to CMVgB
gactgccacggttttcccatgaattatgggaa

SEQ ID NO: 3208 - DNA, 32 bp, Artificial sequence
  Artificial aptamer to CMVgB
gagcacgcttacgggtgcggtcatttgaccga

SEQ ID NO: 3209 - DNA, 32 bp, Artificial sequence
  Artificial aptamer to CMVgB
gatactgcctcagggctgccccgtcgggctag

SEQ ID NO: 3210 - DNA, 32 bp, Artificial sequence
  Artificial aptamer to CMVgB
gattagttcaccgggctacccgggtgtatgga

SEQ ID NO: 3211 - DNA, 32 bp, Artificial sequence
  Artificial aptamer to CMVgB
gattgcgcagagattattgcgcgtaggttttc

SEQ ID NO: 3212 - DNA, 32 bp, Artificial sequence
  Artificial aptamer to CMVgB
gcacagaccgattaagcccttcgacgaatata

SEQ ID NO: 3213 - DNA, 32 bp, Artificial sequence
  Artificial aptamer to CMVgB
gcatattcctttctgggcgcaaccgatgcgcg

SEQ ID NO: 3214 - DNA, 32 bp, Artificial sequence
  Artificial aptamer to CMVgB
gcatggttcggggggttataaaccccactttc

SEQ ID NO: 3215 - DNA, 32 bp, Artificial sequence
  Artificial aptamer to CMVgB
gccgagatcgcggtgtggcagatcgacggggt

SEQ ID NO: 3216 - DNA, 32 bp, Artificial sequence
  Artificial aptamer to CMVgB
gcgacgccgcatacttatcaacggctcgtgcg

SEQ ID NO: 3217 - DNA, 32 bp, Artificial sequence
  Artificial aptamer to CMVgB
gcgcagacaccaaaacggcgtaatccacggcg

SEQ ID NO: 3218 - DNA, 32 bp, Artificial sequence
  Artificial aptamer to CMVgB
gcgcggccgtgcggggacagttcgactagtcc

SEQ ID NO: 3219 - DNA, 32 bp, Artificial sequence
  Artificial aptamer to CMVgB
gcgggtctggttattttatccgggcccagcat

SEQ ID NO: 3220 - DNA, 32 bp, Artificial sequence
  Artificial aptamer to CMVgB
gcggttctccgctccgaagtacactaagtgtg

SEQ ID NO: 3221 - DNA, 32 bp, Artificial sequence
  Artificial aptamer to CMVgB
gcgtcatgcaaatgcgcaagcacgacgttgct

SEQ ID NO: 3222 - DNA, 32 bp, Artificial sequence
  Artificial aptamer to CMVgB
gctcggctgttagcatggcaatcttattggca

SEQ ID NO: 3223 - DNA, 32 bp, Artificial sequence
  Artificial aptamer to CMVgB
gctgactgctccacgtacagagcaggtgaact

SEQ ID NO: 3224 - DNA, 32 bp, Artificial sequence
  Artificial aptamer to CMVgB
gggtggggacgcgaatttcgcggaattcgaga

SEQ ID NO: 3225 - DNA, 32 bp, Artificial sequence
  Artificial aptamer to CMVgB
ggtcctaaagatgaggtaccaaggtggtgcct

SEQ ID NO: 3226 - DNA, 32 bp, Artificial sequence
  Artificial aptamer to CMVgB
gtccacgatggttaaaaccggaatcgtgtgga

SEQ ID NO: 3227 - DNA, 32 bp, Artificial sequence
  Artificial aptamer to CMVgB
gtcggtttatggctaaggtgtacttgccccga

SEQ ID NO: 3228 - DNA, 32 bp, Artificial sequence
  Artificial aptamer to CMVgB
gtggttgtgaacgccaggcagttagcctgtcg

SEQ ID NO: 3229 - DNA, 32 bp, Artificial sequence
  Artificial aptamer to CMVgB
gttacactggtaactcacacgctcgttgtgtg

SEQ ID NO: 3230 - DNA, 32 bp, Artificial sequence
  Artificial aptamer to CMVgB
gttccgggaagccgtaatggctataccctgga

SEQ ID NO: 3231 - DNA, 32 bp, Artificial sequence
  Artificial aptamer to CMVgB
gtttgggcgactggcgaccaagacaaagattg

SEQ ID NO: 3232 - DNA, 32 bp, Artificial sequence
  Artificial aptamer to CMVgB
taaaccgatcacgcatcactgacgaaatcgga

SEQ ID NO: 3233 - DNA, 32 bp, Artificial sequence
  Artificial aptamer to CMVgB
taaccacatgtgtacgacactagtggctgcat

SEQ ID NO: 3234 - DNA, 32 bp, Artificial sequence
  Artificial aptamer to CMVgB
tcacgctccttgtgttcttccactccacaagg

SEQ ID NO: 3235 - DNA, 32 bp, Artificial sequence; identical to SEQ ID NO: 2881
  Artificial aptamer to CMVgB

SEQ ID NO: 3236 - DNA, 32 bp, Artificial sequence
  Artificial aptamer to CMVgB
tcgaacgtagaacgtaactcggaataaatccg

SEQ ID NO: 3237 - DNA, 32 bp, Artificial sequence
  Artificial aptamer to CMVgB
tcggtggtggaccacagtaggtcttcctacac

SEQ ID NO: 3238 - DNA, 32 bp, Artificial sequence
  Artificial aptamer to CMVgB
tgaccactcctgtaacgtagaacatctacgta

SEQ ID NO: 3239 - DNA, 32 bp, Artificial sequence
  Artificial aptamer to CMVgB
tgccttaggagttagaaccatggtggttcttt

SEQ ID NO: 3240 - DNA, 32 bp, Artificial sequence
  Artificial aptamer to CMVgB
tgggacgtcctccctggcacaatacactgtgc

SEQ ID NO: 3241 - DNA, 32 bp, Artificial sequence
  Artificial aptamer to CMVgB
ttacgctaagacttttggcgctagccaaaggt

SEQ ID NO: 3242 - DNA, 32 bp, Artificial sequence
  Artificial aptamer to CMVgB
ttacggtaccaatccgttgttgaatgctttat

SEQ ID NO: 3243 - DNA, 32 bp, Artificial sequence
  Artificial aptamer to BontB
ggtggggaataagtcgttacgatctatcccca

SEQ ID NO: 3244 - DNA, 32 bp, Artificial sequence
  Artificial aptamer to BontB
aggggacaacagtccgctattttgcttaggta

SEQ ID NO: 3245 - DNA, 32 bp, Artificial sequence
  Artificial aptamer to BontB
gtgcccgcaacgaggaggaaggtacggtgcgc

SEQ ID NO: 3246 - DNA, 32 bp, Artificial sequence
  Artificial aptamer to BontB
gtgcgcataactgtgcacaacatcttactaaa

SEQ ID NO: 3247 - DNA, 32 bp, Artificial sequence
  Artificial aptamer to BontB
gtgcgctaagatgcaaagcgctagtaattgcc

SEQ ID NO: 3248 - DNA, 32 bp, Artificial sequence
  Artificial aptamer to BontB
gtgcgctcctccattgaggggctatgattgcc

SEQ ID NO: 3249 - DNA, 32 bp, Artificial sequence
  Artificial aptamer to BontB
gtgcggcgggactctcgcaaccttcgcactaa

SEQ ID NO: 3250 - DNA, 32 bp, Artificial sequence
  Artificial aptamer to BontB
gtgcgttaacggcagtcttatgacgataacga

SEQ ID NO: 3251 - DNA, 32 bp, Artificial sequence
  Artificial aptamer to BontB
gtggacacggccaaggttttagggtcgtggta

SEQ ID NO: 3252 - DNA, 32 bp, Artificial sequence
  Artificial aptamer to BontB
gtggataatccgctttgcggcggagacaaggg

SEQ ID NO: 3253 - DNA, 32 bp, Artificial sequence
  Artificial aptamer to BontB
gtggcatgatgttaatgccaataatgctggaa

SEQ ID NO: 3254 - DNA, 32 bp, Artificial sequence
  Artificial aptamer to BontB
gtggggcagccgtcgtcggtgtaatgctgcgt

SEQ ID NO: 3255 - DNA, 32 bp, Artificial sequence
  Artificial aptamer to BontB
gtgggggcgggataccccctcgataaaccggc

SEQ ID NO: 3256 - DNA, 32 bp, Artificial sequence
  Artificial aptamer to BontB
taaggggcatatagacgagtggtcttgatgca

SEQ ID NO: 3257 - DNA, 32 bp, Artificial sequence
  Artificial aptamer to BontB
tactcacgacgaccaatttcgtcgtaatccga

SEQ ID NO: 3258 - DNA, 32 bp, Artificial sequence
  Artificial aptamer to BontB
tcaccgcctggtgggggggaagaaattcctgc

SEQ ID NO: 3259 - DNA, 32 bp, Artificial sequence
  Artificial aptamer to BontB
tccaaacggaggtattaaccatccggtatgtc

SEQ ID NO: 3260 - DNA, 32 bp, Artificial sequence
  Artificial aptamer to BontB
tccactgtgaatgccaccgttggcggggccgt

SEQ ID NO: 3261 - DNA, 32 bp, Artificial sequence
  Artificial aptamer to BontB
tcgggggcggccacatcgtatgtggagcaatg

SEQ ID NO: 3262 - DNA, 32 bp, Artificial sequence
  Artificial aptamer to BontB
tgcggggagcccccgtaatagcgattgaaacc

SEQ ID NO: 3263 - DNA, 32 bp, Artificial sequence
  Artificial aptamer to BontB
tgtacgggggtctcgaagacctccatctaacc

SEQ ID NO: 3264 - DNA, 32 bp, Artificial sequence
  Artificial aptamer to BontB
ttagcagatacccagcggggtatgccaagtac

SEQ ID NO: 3265 - DNA, 32 bp, Artificial sequence
  Artificial aptamer to BontB
caacacacgcaaacctcgcaatagtgcgagat

SEQ ID NO: 3266 - DNA, 32 bp, Artificial sequence
  Artificial aptamer to BontB
ttgaaaaggaagctttagcagccactgggctg

SEQ ID NO: 3267 - DNA, 32 bp, Artificial sequence
  Artificial aptamer to BontB
ttgaactcgcgaagagcgagacatgagaatga

SEQ ID NO: 3268 - DNA, 32 bp, Artificial sequence
  Artificial aptamer to BontB
ttgagcgatggggctctctcgtcctctcgagt

SEQ ID NO: 3269 - DNA, 32 bp, Artificial sequence
  Artificial aptamer to BontB
ttgccctcgtgattacacgaagctagggactc

SEQ ID NO: 3270 - DNA, 32 bp, Artificial sequence
  Artificial aptamer to BontB
ttgcgtttgacggagtcatacatgaacgctct

SEQ ID NO: 3271 - DNA, 32 bp, Artificial sequence
  Artificial aptamer to BontB
ttgggggatttactcccgaagttccccggaag

SEQ ID NO: 3272 - DNA, 32 bp, Artificial sequence
  Artificial aptamer to BontB
ttgtggcgaagggtatccgccgcatttgagga

SEQ ID NO: 3273 - DNA, 32 bp, Artificial sequence
  Artificial aptamer to BontB
ttgtggtcaccgattattaaaatcgggcgtct

SEQ ID NO: 3274 - DNA, 32 bp, Artificial sequence
  Artificial aptamer to BontB
ttgttcggctaatctcttagtcgaaagcggac

SEQ ID NO: 3275 - DNA, 32 bp, Artificial sequence
  Artificial aptamer to BontB
caacggggcaatgatagattcctggcccgacc

SEQ ID NO: 3276 - DNA, 32 bp, Artificial sequence
  Artificial aptamer to BontB
caagtgggggattttgagtccaaagtcccatt

SEQ ID NO: 3277 - DNA, 32 bp, Artificial sequence
  Artificial aptamer to BontB
cacactagccaagacaccgctctctccttggc

SEQ ID NO: 3278 - DNA, 32 bp, Artificial sequence
  Artificial aptamer to BontB
cagcggggaggcatacctccgaaacatcagca

SEQ ID NO: 3279 - DNA, 32 bp, Artificial sequence
  Artificial aptamer to BontB
caggaagggggaccacgatgtcgatacccctt

SEQ ID NO: 3280 - DNA, 32 bp, Artificial sequence
  Artificial aptamer to BontB
cagggggtccctgggaatccgtatggccggac

SEQ ID NO: 3281 - DNA, 32 bp, Artificial sequence
  Artificial aptamer to BontB
ccaccccacctttggctacctgtggaggtgat

SEQ ID NO: 3282 - DNA, 32 bp, Artificial sequence
  Artificial aptamer to BontB
ccacgatttagcgcagggggtgctgtcgtcca

SEQ ID NO: 3283 - DNA, 32 bp, Artificial sequence
  Artificial aptamer to BontB
cccacccaccattccgggggggatatgtcggc

SEQ ID NO: 3284 - DNA, 32 bp, Artificial sequence
  Artificial aptamer to BontB
ccccaatgttgggggatcgaactctagaacct

SEQ ID NO: 3285 - DNA, 32 bp, Artificial sequence
  Artificial aptamer to BontB
ccccatgctctgggggagattgaagttctttt

SEQ ID NO: 3286 - DNA, 32 bp, Artificial sequence
  Artificial aptamer to BontB
cccgcaaggggggttgcgcttaccattgaggt

SEQ ID NO: 3287 - DNA, 32 bp, Artificial sequence
  Artificial aptamer to BontB
ccgagggaggggacgactcatcaaccccatcc

SEQ ID NO: 3288 - DNA, 32 bp, Artificial sequence
  Artificial aptamer to BontB
ccgagggggtggcctctcccggtgctcaccgc

SEQ ID NO: 3289 - DNA, 32 bp, Artificial sequence
  Artificial aptamer to BontB
ccgcaggggtagccgacttaatcccgtgtggt

SEQ ID NO: 3290 - DNA, 32 bp, Artificial sequence
  Artificial aptamer to BontB
ccggggagaaaacgatcaacgtcatgatcgac

SEQ ID NO: 3291 - DNA, 32 bp, Artificial sequence
  Artificial aptamer to BontB
cctggggtgcattcaccctttctatgtatgtg

SEQ ID NO: 3292 - DNA, 32 bp, Artificial sequence
  Artificial aptamer to BontB
cgaagaggaggggtcttcggaaaccgctggga

SEQ ID NO: 3293 - DNA, 32 bp, Artificial sequence
  Artificial aptamer to BontB
cgactaacaatagtcgtagggggggcctgcga

SEQ ID NO: 3294 - DNA, 32 bp, Artificial sequence
  Artificial aptamer to BontB
cgagtggcggggacgccgatttgaagatcaaa

SEQ ID NO: 3295 - DNA, 32 bp, Artificial sequence
  Artificial aptamer to BontB
acccatccagttagcgtgacttacctacacgc

SEQ ID NO: 3296 - DNA, 32 bp, Artificial sequence
  Artificial aptamer to BontB
cgcaagagcggggatcctttagattttggatc

SEQ ID NO: 3297 - DNA, 32 bp, Artificial sequence
  Artificial aptamer to BontB
cgcaagataagacgttttatcaggttgcggga

SEQ ID NO: 3298 - DNA, 32 bp, Artificial sequence
  Artificial aptamer to BontB
cgcaaggtgcgatccacagtttagactgctcc

SEQ ID NO: 3299 - DNA, 32 bp, Artificial sequence
  Artificial aptamer to BontB
cgcaagtgacgacggaacggacgtcataaacc

SEQ ID NO: 3300 - DNA, 32 bp, Artificial sequence
  Artificial aptamer to BontB
cgcaatatgacaagcatatccagtgcggaatt

SEQ ID NO: 3301 - DNA, 32 bp, Artificial sequence
  Artificial aptamer to BontB
cgcacataccgatcccggtatatcatctatca

SEQ ID NO: 3302 - DNA, 32 bp, Artificial sequence
  Artificial aptamer to BontB
cgcagaatgcgtaagttggggccgaaggcgtt

SEQ ID NO: 3303 - DNA, 32 bp, Artificial sequence
  Artificial aptamer to BontB
cgcaggtaagccacgacctgcaaatgacaatc

SEQ ID NO: 3304 - DNA, 32 bp, Artificial sequence
  Artificial aptamer to BontB
cgcatgatacgagcaatttgcgaaagcgcaat

SEQ ID NO: 3305 - DNA, 32 bp, Artificial sequence
  Artificial aptamer to BontB
cgcggggttctgctgaccgcagagtgctccgt

SEQ ID NO: 3306 - DNA, 32 bp, Artificial sequence
  Artificial aptamer to BontB
cgggggacttagaaagtactccgaaaatttta

SEQ ID NO: 3307 - DNA, 32 bp, Artificial sequence
  Artificial aptamer to BontB
cggggggagcgcacttcctcgttagcggtcca

SEQ ID NO: 3308 - DNA, 32 bp, Artificial sequence
  Artificial aptamer to BontB
cgtgggcggggtcaataatcgagatgacccac

SEQ ID NO: 3309 - DNA, 32 bp, Artificial sequence
  Artificial aptamer to BontB
gacaccttcattccccggccttggggacctcg

SEQ ID NO: 3310 - DNA, 32 bp, Artificial sequence
  Artificial aptamer to BontB
gacgcggcggggtcacgacgggtatgctgttc

SEQ ID NO: 3311 - DNA, 32 bp, Artificial sequence
  Artificial aptamer to BontB
gactcgggggtgtaaaagtcagaaccccagag

SEQ ID NO: 3312 - DNA, 32 bp, Artificial sequence
  Artificial aptamer to BontB
gaggggcggcaaatgtttaaaacgacgcccaa

SEQ ID NO: 3313 - DNA, 32 bp, Artificial sequence
  Artificial aptamer to BontB
gcactcctctcctcataggatggggaccatcc

SEQ ID NO: 3314 - DNA, 32 bp, Artificial sequence
  Artificial aptamer to BontB
gcaggggcgacgtacaagattctgtacgtaca

SEQ ID NO: 3315 - DNA, 32 bp, Artificial sequence
  Artificial aptamer to BontB
gcaggggtaaatacacctgcgcaaacatactc

SEQ ID NO: 3316 - DNA, 32 bp, Artificial sequence
  Artificial aptamer to BontB
gcaggttgggggcctcgctattattagcgcct

SEQ ID NO: 3317 - DNA, 32 bp, Artificial sequence
  Artificial aptamer to BontB
gcgggggcggcatcgcagtaccatcatgcgaa

SEQ ID NO: 3318 - DNA, 32 bp, Artificial sequence
  Artificial aptamer to BontB
gcggtgggactacgatctacgttagtccatag

SEQ ID NO: 3319 - DNA, 32 bp, Artificial sequence
  Artificial aptamer to BontB
gctcgggggtatacctccggtggtggcacata

SEQ ID NO: 3320 - DNA, 32 bp, Artificial sequence
  Artificial aptamer to BontB
ggaggggaagtcgtttctccctctagccagaa

SEQ ID NO: 3321 - DNA, 32 bp, Artificial sequence
  Artificial aptamer to BontB
ggctccggcggggattgccgacgctcgattgg

SEQ ID NO: 3322 - DNA, 32 bp, Artificial sequence
  Artificial aptamer to BontB
gggcggggtatttcttaggcttaaccgcgctg

SEQ ID NO: 3323 - DNA, 32 bp, Artificial sequence
  Artificial aptamer to BontB
ggggcggggaggtatctacgttattacccgcg

SEQ ID NO: 3324 - DNA, 32 bp, Artificial sequence
  Artificial aptamer to BontB
gggggatgactccgcttgcacaattgtgcata

SEQ ID NO: 3325 - DNA, 32 bp, Artificial sequence
  Artificial aptamer to BontB
gggggccttagaggccgaatgacctgtcataa

1. A ligand to IgE comprising a nucleic acid sequence having substantial homology or identity to a sequence selected from the group consisting of sequence IDs 811, 823, 974 and 1428.

2. The ligand of claim 1 further comprising at least one modified nucleotide.

3. A ligand to AFP comprising a nucleic acid sequence having substantial homology or identity to a sequence selected from the group consisting of sequence IDs 326, 799 and 1135.

4. The ligand of claim 3 further comprising at least one modified nucleotide.

5. A ligand to CMVgB comprising a nucleic acid sequence having substantial homology or identity to a sequence selected from the group consisting of sequence IDs 3156, 3178.

6. The ligand of claim 5 further comprising at least one modified nucleotide.
